(19) United States
(12) Patent Application Publication
(10) Pub. No.: US 2011/0287936 A1
(43) Pub. Date: Nov. 24, 2011

(54) GENE SWITCH COMPOSITIONS AND METHODS OF USE

(75) Inventors: Jin Fang, Redwood City, CA (US); William J. Gordon-Kamm, Urbandale, IA (US); Keith S. Lowe, Johnston, IA (US); Kevin E. McBride, Davis, CA (US); Brian McGonigle, Wilmington, DE (US); Carl R. Simmons, Des Moines, IA (US)

(73) Assignees: E.I. duPont de Nemours and Company, Wilmington, DE (US); Pioneer Hi-Bred International, Inc., Johnston, IA (US)

(21) Appl. No.: 13/086,765

(22) Filed: Apr. 14, 2011

Related U.S. Application Data
(60) Provisional application No. 61/327,172, filed on Apr. 23, 2010.

(51) Int. Cl. A01N 47/34; A01P 21/00; A01H 5/10; C12N 5/10; C12N 15/113; A01H 5/00

(52) U.S. Cl. 504/212; 504/329; 504/214; 504/211; 536/24.1; 800/298; 435/419; 800/320.1; 800/320.2; 800/320; 800/320.3; 800/312; 800/306; 800/314; 800/317.3; 800/322; 504/215

(57) ABSTRACT

Compositions and methods relating to the use of sulfonylurea-mediated control of gene expression are provided. Compositions include sulfonylurea responsive chemical switches wherein the gene expression is regulated by a sulfonylurea compound. Compositions also include polynucleotides encoding the polypeptides as well as constructs, vectors, prokaryotic and eukaryotic cells, and eukaryotic organisms including plants and seeds comprising the polynucleotide, and/or produced by the methods. Also provided are methods to regulate expression of a polynucleotide of interest in a cell or organism, and methods to modify a genome, including in a plant or plant cell.

### CROSS-REFERENCE TO RELATED APPLICATIONS

[0001] This application claims the benefit of U.S. Provisional Application No. 61/327,172, filed Apr. 23, 2010, which is incorporated herein in its entirety by reference.

### REFERENCE TO SEQUENCE LISTING SUBMITTED ELECTRONICALLY

[0002] The official copy of the sequence listing is submitted electronically via EFS-Web as an ASCII formatted sequence listing with a file named 403001seqlist.txt, created on Apr. 14, 2011, and having a size of 1.33 MB and is filed concurrently with the specification. The sequence listing contained in this ASCII formatted document is part of the specification and is herein incorporated by reference in its entirety.

### FIELD OF THE INVENTION

[0003] The invention relates to the field of molecular biology, more particularly to the regulation of gene expression.

### BACKGROUND

[0004] The tetracycline operon system, comprising repressor and operator elements, was originally isolated from bacteria. The operon system is tightly controlled by the presence of tetracycline, and self-regulates the level of expression of tetA and tetR genes. The product of tetA removes tetracycline from the cell. The product of tetR is the repressor protein that binds to the operator elements with a K_{d} of about 10 pM in the absence of tetracycline, thereby blocking expression or tetA and tetR.

[0005] This system has been modified to control expression of other polynucleotides of interest, and/or for use in other organisms, mainly for use in animal systems. Tet operon based systems have had limited use in plants, at least partially due to problems with the inducers which are typically antibiotic compounds, and sensitive to light.

[0006] There is a need to regulate expression of sequences of interest in organisms. Gene switch compositions and methods to regulate expression in response to compounds, such as sulfonylurea compounds, are provided.

### SUMMARY

[0007] Compositions and methods relating to the use of sulfonylurea-mediated control of gene expression are provided. Compositions include sulfonylurea responsive chemical switches wherein the gene expression is regulated by a sulfonylurea compound. Compositions also include polynucleotides encoding the polypeptides, repressible promoters, as well as constructs, vectors, prokaryotic and eukaryotic cells, and organisms including plants, plant cells, and seeds comprising any component, and/or produced by any method. Also provided are methods to regulate expression of a polynucleotide of interest in a cell or organism, and methods to modify a genome, including in a plant or plant cell.

[0008] The following embodiments are encompassed by the present invention.

[0009] 1. A method to regulate expression in a plant cell contained in a plant or in a seed comprising:

[0010] (a) providing the plant cell comprising a sulfonylurea-regulated gene switch which controls expression of a polynucleotide of interest, wherein said plant cell is a sulfonylurea tolerant plant cell; and;

[0011] (b) providing a sulfonylurea compound which regulates the gene switch wherein the sulfonylurea compound is provided by foliar application, root drench application, pre-emergence application, post-emergence application, or seed treatment application.

[0012] 2. The method of embodiment 1, wherein expression of the polynucleotide of interest alters the phenotype of the plant cell.

[0013] 3. The method of embodiment 1 or 2, wherein expression of the polynucleotide of interest alters the genotype of the plant cell.

[0014] 4. The method of any one of embodiments 1-3, wherein providing the sulfonylurea compound activates expression of the polynucleotide of interest.

[0015] 5. The method of any one of embodiments 1-4, wherein the plant cell is from a monocot or a dicot.

[0016] 6. The method of embodiment 5, wherein the plant cell is from maize, rice, sorghum, sugarcane, barley, oat, wheat, turfgrass, soybean, canola, cotton, tobacco, sunflower, safflower, or alfalfa.

[0017] 7. The method of any one of embodiments 1-6, wherein the sulfonylurea-regulated gene switch comprises a repressible promoter operably linked to a polynucleotide of interest, wherein the repressible promoter comprises a tet operator.

[0018] 8. The method of any one of embodiments 1-7, wherein the sulfonylurea-regulated gene switch comprises a repressible promoter selected from the group consisting of SEQ ID NO:855, 856, 857, 858, 859, and 860, or a repressible promoter having at least 95% sequence identity to SEQ ID NO:855, 856, 857, 858, 859, 860 or 862.

[0019] 9. The method of any one of embodiments 1-8, wherein the sulfonylurea compound comprises a pyrimidinylsulfonylurea compound, a triazinylsulfonylurea compound, or a thiadazolylurea compound.

[0020] 10. The method of embodiment 9, wherein the sulfonylurea compound comprises a chlorosulfuron, an ethametsulfuron, a thifensulfuron, a metsulfuron, a sulfometuron, a tribenuron, a chlorimuron, a nicosulfuron, or a rimsulfuron.

[0021] 11. The method of any one of embodiments 1-10, wherein the polynucleotide of interest encodes a polypeptide that specifically binds to a target nucleic acid sequence.

[0022] 12. The method of embodiment 11, wherein the polypeptide is a recombinase, an integrase, a nuclease, a homing endonuclease, or a zinc-finger nuclease.

[0023] 13. The method of any one of embodiments 1-12, wherein the sulfonylurea-regulated gene switch comprises a sulfonylurea-responsive repressor comprising an amino acid sequence of any one of SEQ ID NOs:3-419, or an amino acid sequence having at least 85% sequence identity to any one of SEQ ID NOs:3-419.

[0024] 14. A sulfonylurea-regulated gene switch which controls expression of a polynucleotide of interest, wherein the polynucleotide of interest encodes a polypeptide that specifically binds a DNA sequence or encodes a polypeptide that cuts a DNA sequence.

[0025] 15. The sulfonylurea-regulated gene switch of embodiment 14, wherein the encoded polypeptide is a recombinase, an integrase, a nuclease, a homing endonuclease, or a zinc-finger nuclease.

[0026] 16. The sulfonylurea-regulated gene switch of embodiment 14 or 15, wherein the sulfonylurea gene switch comprises a sulfonylurea responsive repressor, wherein the sulfonylurea responsive repressor is operably linked to a promoter active in the plant wherein the promoter is a constitutive promoter, a tissue-preferred promoter, a developmental stage-preferred promoter, an inducible promoter, or a repressible promoter.

[0027] 17. The sulfonylurea-regulated gene switch of embodiment 16, wherein

[0028] (a) the constitutive promoter is a MTH promoter, an EF1a promoter, a PIP promoter, a ubiquitin promoter, an actin promoter, or a 35S CaMV promoter;

[0029] (b) the tissue-preferred promoter is a meristem-preferred promoter, an embryo-preferred promoter, a leaf-preferred promoter, a root-preferred promoter, an anther-preferred promoter, a pollen-preferred promoter, or a floral-preferred promoter;

[0030] (c) the developmental stage-preferred promoter is an early embryo promoter, a late embryo promoter, a germination-preferred promoter, or a senescence-preferred promoter;

[0031] (d) the inducible promoter is a chemical inducible promoter, a pathogen inducible promoter, a heat-stress promoter, a drought-stress promoter, a light inducible promoter, an osmoticum inducible promoter, or a metal inducible promoter; or,

[0032] (e) the repressible promoter is a tetracycline-repressible promoter, or a lactose-repressible promoter.

[0033] 18. The sulfonylurea-regulated gene switch of embodiment 16 or 17, wherein the polynucleotide of interest or said sulfonylurea-responsive repressor is operably linked to a repressible promoter comprising at least one tetracycline operator sequence.

[0034] 19. The sulfonylurea-regulated gene switch of embodiment 18, wherein the repressible promoter is a constitutive promoter, a tissue-preferred promoter, or a development stage-preferred promoter.

[0035] 20. The sulfonylurea-regulated gene switch of embodiment 19, wherein the repressible promoter is a 35S CaMV promoter, an actin promoter, an EF1A promoter, an MMV promoter, a dMMV promoter, a MP1 promoter, or a BSV promoter.

[0036] 21. The sulfonylurea regulated gene switch of embodiment 20, wherein the repressible promoter comprises a polynucleotide sequence as set forth in SEQ ID NO:855, 856, 857, 858, 859, 860 or 862, or a polynucleotide sequence having at least 95% sequence identity to SEQ ID NO:855, 856, 857, 858, 859, 860 or 862.

[0037] 22. The sulfonylurea regulated gene switch of embodiment 16, wherein the sulfonylurea-responsive repressor comprises an amino acid sequence of any one of SEQ ID NOs:3-419, or an amino acid sequence having at least 85% sequence identity to any one of SEQ ID NOs:3-419.

[0038] 23. A transgenic plant, a transgenic plant cell, or a transgenic seed comprising the sulfonylurea regulated gene switch of any one of embodiments 14-22.

[0039] 24. The transgenic plant, the transgenic plant cell, or the transgenic seed of embodiment 23, wherein the transgenic plant, the transgenic plant cell, or the transgenic seed is from a monocot or a dicot.

[0040] 25. The transgenic plant, the transgenic plant cell, or the transgenic seed of embodiment 24, wherein the monocot or dicot is from maize, rice, sorghum, sugarcane, barley, oat, wheat, turfgrass, soybean, canola, cotton, tobacco, sunflower, safflower, or alfalfa.

[0041] 26. A recombinant polynucleotide comprising a repressible promoter, wherein the repressible promoter is active in a plant cell, and the repressible promoter comprises an actin promoter, an EF1A promoter, an MMV promoter, a dMMV promoter, an MP1 promoter, or a BSV promoter operably linked to at least one operator sequence.

[0042] 27. The recombinant polynucleotide of embodiment 26, wherein the repressible promoter comprises a polynucleotide sequence as set forth in SEQ ID NO:855, 856, 857, 858, 859, 860 or 862 or a polynucleotide sequence having at least 95% sequence identity to SEQ ID NO:855, 856, 857, 858, 859, 860 or 862.

[0043] 28. A method to regulate expression in a cell comprising:

[0044] (a) providing the cell comprising a regulated gene switch which controls expression of a polynucleotide of interest, wherein the gene switch comprises a repressible promoter of embodiment 26 or 27; and;

[0045] (b) providing a ligand compound which regulates the gene switch, wherein ligand compound comprises a tetracycline, a sulfonylurea, or any analogs thereof.

[0046] 29. A recombinant polynucleotide comprising a repressible promoter operably linked to a polynucleotide encoding a sulfonylurea-responsive repressor.

[0047] 30. The recombinant polynucleotide of embodiment 29, wherein the encoded sulfonylurea-responsive repressor comprises an amino acid sequence of any one of SEQ ID NOs:3-419 or an amino acid sequence having at least 85% sequence identity to any one of SEQ ID NOs:3-419.

[0048] 31. The recombinant polynucleotide of embodiment 29, wherein the repressible promoter is an actin promoter, an MMV promoter, a dMMV promoter, an MP1 promoter, or a BSV promoter operably linked to at least one operator sequence.

[0049] 32. The recombinant polynucleotide of any one of embodiments 29-31, wherein the repressible promoter comprises a polynucleotide sequence as set forth in SEQ ID NO:855, 856, 857, 858, 859, 860 or 862, or a polynucleotide sequence having at least 95% sequence identity to SEQ ID NO:855, 856, 857, 858, 859, 860 or 862.

### BRIEF DESCRIPTION OF DRAWINGS

[0050] FIG. 1. Summary of source diversity, library design, hit diversity, and population bias for several generations of sulfonylurea repressor shuffling libraries. A dash (“-”) indicates no amino acid diversity introduced at that position in that library. An X indicates that the library oligonucleotides were designed to introduce complete amino acid diversity (any of 20 amino acids) at that position in that library. Residues in bold indicate bias during selection with larger font size indicating a greater degree of bias in the selected population. Residues in parentheses indicate selected mutations. The phylogenetic diversity pool was derived from a broad family of 34 tetracycline repressor sequences.

[0051] FIG. 2. Exemplifies promoter:operator designs. Panel A shows a dMMV promoter before and after placement of tet operators into the sequence. Panel B shows EF1A2 promoter before and after placement of tet operators into the sequence.

[0052] FIG. 3. Exemplifies promoter activity before and after addition of tet operators. The y-axis of each graph is relative light units measured by the luciferase assay. Panel A compares 35SCaMV promoter +/−tet operators. Panel B compares MMV promoter +/−tet operators. Panel C compares EF1A2 promoter +/−tet operators. Panel D compares dMMV promoter +/−tet operators.

[0053] FIG. 4. Exemplifies repressor and/or ligand regulation of tet operator-containing promoters. The y-axis of each graph is relative light units measured by the luciferase assay.

[0054] FIG. 5. Examples of gene switch elements, compositions, and combinations are provided. Pro indicates any promoter, Pro/Op indicates any repressible promoter, POI is a polynucleotide of interest, and RS indicates a recombination site.

[0055] FIG. 6. Exemplary autoregulatory constructs.

[0056] FIG. 7. Transient expression of control and autoregulatory constructs.

[0057] FIG. 8. Transient expression of control and autoregulatory constructs.

[0058] FIG. 9. Dose response of dsRED activation to ethametsulfuron in transgenic auto-regulated lines of tobacco.

### DETAILED DESCRIPTION

[0059] Chemically regulated expression tools have proven valuable for studying gene function and regulation in many biological systems. These systems allow testing for the effect of expression of any gene of interest in a culture system or whole organism when the transgene cannot be specifically regulated, or continuously expressed due to negative consequences. These systems essentially provide the opportunity to do “pulse” or “pulse-chase” gene expression testing. A chemical switch-mediated expression system allows testing of genomic, proteomic, and/or metabolomic responses immediately following activation or inactivation of a target sequence. These types of tests cannot be easily done with constitutive, developmental, or tissue-specific expression systems. Chemical switch technologies may also provide a means for gene therapy.

[0060] Chemical switch systems can be commercially applied, such as in agricultural biotechnology. For agricultural purposes it is desired to be able to control the expression and/or genetic flow of transgenes in the environment, such as herbicide resistance genes, especially in cases where weedy relatives of the target crop exist. In addition, having a family of viable chemical switch mechanisms would enable trait inventory management from a single transgenic crop, for example, one production line could be used to deliver selected traits on customer demand via specific chemical activation. Additionally, hybrid seed production could be streamlined by using chemical control of hybrid maintenance.

[0061] The Tet repressor (TetR) based genetic switch system widely used in animal systems has had limited use in plant genetic systems, due in part to problems with the activator ligands. A tetracycline repressor has been redesigned to specifically recognize sulfonylurea compounds instead of tetracycline compounds, while retaining the ability to specifically bind tetracycline operator sequences. Through several rounds of library design and shuffling based on rational modeling, sulfonylurea-responsive repressors (SuRs) have been developed. Compositions and methods relating to the use of sulfonylurea-responsive repressors are provided.

[0062] A chemical switch, or gene switch, comprises two components. One component comprises a polynucleotide encoding a repressor, the second component comprises a repressible/inducible promoter operably linked to a polynucleotide of interest. Expression of the polynucleotide of interest is optionally controlled by providing the appropriate chemical ligand. The repressible/ inducible promoter (hereafter referred to as a repressible promoter) comprises at least one operator sequence to which the repressor polypeptide specifically binds, which controls the transcriptional activity of the promoter. Useful repressors include those that specifically bind to an operator in the absence of the chemical ligand, those with a reverse phenotype that specifically bind to an operator in the presence of the chemical ligand, and those fused to an activator or domain to control activity.

[0063] The activity of the gene switch can be controlled by selecting the combination of elements used in the switch. These include, but are not limited to the promoter operably linked to the repressor, the repressor, the repressible promoter operably linked to the polynucleotide of interest, and optionally the polynucleotide of interest. Further control is provided by selection, dosage, conditions, and/or timing of the application of the chemical ligand. In some examples the expression of the polynucleotide of interest can be controlled more stringently, controlled in various tissues or cells, restricted to selected tissue or cell type, restricted to specific developmental stage(s), restricted to specific environmental conditions, and/or restricted to specific generation of a plant or progeny thereof. In some examples the repressor is operably linked to a constitutive promoter. In some examples the repressor is operably linked to a non-constitutive promoter, including but not limited to a tissue preferred promoter, an inducible promoter, a repressible promoter, a developmental stage preferred promoter, or a promoter having more than one of these properties. In some examples the promoter is primarily expressed in roots, leaves, stems, flowers, silks, anthers, pollen, meristem, germline, seed, endosperm, embryos, or progeny.

[0064] In some examples the gene switch may further comprise additional elements. In some examples, one or more additional elements may provide means by which expression of the polynucleotide of interest can be controlled more stringently, controlled in various tissues or cells, restricted to selected tissue or cell type, restricted to specific developmental stage(s), restricted to specific environmental conditions, and/or restricted to specific generation of a plant or progeny thereof. In some examples those elements include site-specific recombination sites, site-specific recombinases, or combinations thereof.

[0065] In some examples, the gene switch may comprise a polynucleotide encoding a repressor, a promoter linked to a polynucleotide of interest, a sequence flanked by site-specific recombination sites, and a repressible promoter operably linked to a site-specific recombinase that specifically recognizes the site-specific recombination sites and implements a recombination event. In some examples, the recombination event is excision of the sequence flanked by the recombination sites. In some instances, the excision creates an operable linkage between the promoter and the polynucleotide of interest. In some examples, the promoter operably linked to the polynucleotide of interest is a non-constitutive promoter, including but not limited to a tissue preferred promoter, an inducible promoter, a repressible promoter, a developmental stage preferred promoter, or a promoter having more than one of these properties. In some examples the promoter is primarily expressed in roots, leaves, stems, flowers, silks, anthers, pollen, meristem, germline, seed, endosperm, embryos, or progeny.

[0066] For example, the gene switch may comprise a polynucleotide encoding a repressor, a repressible promoter linked to a polynucleotide of interest, a sequence flanked by site-specific recombination sites, and a site-specific recombinase that specifically recognizes the site-specific recombination sites and implements a recombination event. In some examples, the recombination event is excision of the sequence flanked by the recombination sites. In some instances, the excision creates an operable linkage between the repressible promoter and the polynucleotide of interest. In some examples, the sequence flanked by recombination sites comprises a recombinase expression cassette. In some examples the promoter is primarily expressed in roots, leaves, stems, flowers, silks, anthers, pollen, meristem, germline, seed, endosperm, or embryos. In some examples the excision occurs in a parent, a cell, a tissue, or a tissue culture such that the progeny inherit the post-excision product.

[0067] In some examples, the gene switch may comprise a polynucleotide encoding a repressor, a promoter operably linked to a polynucleotide of interest flanked by site-specific recombination sites, and a repressible promoter operably linked to a site-specific recombinase that specifically recognizes the site-specific recombination sites and implements a recombination event. In some examples, the recombination event is excision of the sequence flanked by the recombination sites. In some examples, the promoter operably linked to the polynucleotide of interest is a non-constitutive promoter, including but not limited to a tissue preferred promoter, an inducible promoter, a repressible promoter, a developmental stage preferred promoter, or a promoter having more than one of these properties. In some examples the promoter is primarily expressed in roots, leaves, stems, flowers, silks, anthers, pollen, meristem, germline, seed, endosperm, embryos, or progeny.

[0068] In another example, the gene switch may comprise a polynucleotide encoding a repressor, a promoter linked to a polynucleotide of interest, a sequence flanked by site-specific recombination sites, and a repressible promoter operably linked to a site-specific recombinase that specifically recognizes the site-specific recombination sites and implements a recombination event. In some examples, the recombination event is inversion of the sequence flanked by the recombination sites. In some instances, the inversion creates an operable linkage between the promoter and the polynucleotide of interest. In some examples, the promoter operably linked to the polynucleotide of interest is a non-constitutive promoter, including but not limited to a tissue preferred promoter, an inducible promoter, a repressible promoter, a developmental stage preferred promoter, or a promoter having more than one of these properties. In some examples the promoter is primarily expressed in roots, leaves, stems, flowers, silks, anthers, pollen, meristem, germline, seed, endosperm, embryos, or progeny. In some examples the inversion occurs in a parent, a cell, a tissue, or a tissue culture such that the progeny inherit the post-inversion product.

[0069] For example, the gene switch may comprise a polynucleotide encoding a repressor, a repressible promoter linked to a polynucleotide of interest, a sequence flanked by site-specific recombination sites, and a site-specific recombinase that specifically recognizes the site-specific recombination sites and implements a recombination event. In some examples, the recombination event is inversion of the sequence flanked by recombination sites. In some instances, the inversion creates an operable linkage between the repressible promoter and the polynucleotide of interest. In some cases, the sequence flanked by site-specific recombination sites is the polynucleotide of interest. In some cases, the sequence flanked by site-specific recombination sites is the repressible promoter. In some examples, a recombinase expression cassette is provided, wherein the recombinase is operably linked to a non-constitutive promoter, including but not limited to a tissue preferred promoter, an inducible promoter, a repressible promoter, a developmental stage preferred promoter, or a promoter having more than one of these properties. In some examples the promoter is primarily expressed in roots, leaves, stems, flowers, silks, anthers, pollen, meristem, seed, endosperm, embryos, or progeny. In some examples the inversion occurs in a parent, a cell, a tissue, or a tissue culture such that the progeny inherit the post-inversion product.

[0070] In some examples, the gene switch may comprise a polynucleotide encoding a repressor, a promoter operably linked to a polynucleotide of interest flanked by site-specific recombination sites, and a repressible promoter operably linked to a site-specific recombinase that specifically recognizes the site-specific recombination sites and implements a recombination event. In some examples, the recombination event is inversion of the sequence flanked by the recombination sites. In some examples, the promoter operably linked to the polynucleotide of interest is a non-constitutive promoter, including but not limited to a tissue preferred promoter, an inducible promoter, a repressible promoter, a developmental stage preferred promoter, or a promoter having more than one of these properties. In some examples the promoter is primarily expressed in roots, leaves, stems, flowers, silks, anthers, pollen, meristem, germline, seed, endosperm, embryos, or progeny.

[0071] Sulfonylurea-responsive repressors (SuRs) include any repressor polypeptide whose binding to an operator sequence is controlled by a ligand comprising a sulfonylurea compound. In some examples, the repressor binds specifically to the operator in the absence of a sulfonylurea ligand. In some examples, the repressor binds specifically to the operator in the presence of a sulfonylurea ligand. Repressors that bind to an operator in the presence of the ligand are sometimes called a reverse repressor. In some examples compositions include SuR polypeptides that specifically bind to a tetracycline operator, wherein the specific binding is regulated by a sulfonylurea compound. In some examples compositions include an isolated sulfonylurea repressor (SuR) polypeptide comprising at least one amino acid substitution to a wild type tetracycline repressor protein ligand binding domain wherein the SuR polypeptide, or a multimer thereof, specifically binds to a polynucleotide comprising an operator sequence, wherein repressor-operator binding is regulated by the absence or presence of a sulfonylurea compound. In some examples compositions included isolated sulfonylurea repressors comprising a ligand binding domain comprising at least one amino acid substitution to a wild type tetracycline repressor protein ligand binding domain fused to a heterologous operator DNA binding domain which specifically binds to a polynucleotide comprising the operator sequence or derivative thereof, wherein repressor-operator binding is regulated by the absence or presence of a sulfonylurea compound. Any operator DNA binding domain can be used, including but not limited to an operator DNA binding domain from repressors included tet, lac, trp, phd, arg, LexA, phiCh1 repressor, lambda C1 and Cro repressors, phage X repressor, MetJ, phir1t rro, phi434 C1 and Cro repressors, RafR, gal, ebg, uxuR, exuR, ROS, SinR, PurR, FruR, P22 C2, TetC, AcrR, Betl, Bm3R1, EnvR, QacR, MtrR, TcmR, Ttk, YbiH, YhgD, and mu Ner, or DNA binding domains in Interpro families including but not limited to IPR001647, IPR010982, and IPR011991.

[0072] In some examples compositions include an isolated sulfonylurea repressor (SuR) polypeptides comprising at least one amino acid substitution to a wild type tetracycline repressor protein wherein the SuR polypeptide, or a multimer thereof, specifically binds to a polynucleotide comprising a tetracycline operator sequence, wherein repressor-operator binding is regulated by the absence or presence of a sulfonylurea compound.

[0073] Wild type repressors include tetracycline class A, B, C, D, E, G, H, J and Z repressors. An example of the TetR(A) class is found on the Tn1721 transposon and deposited under GenBank accession X61307, crossreferenced under gi48198, with encoded protein accession CAA43639, crossreferenced under gi48195 and UniProt accession Q56321. An example of the TetR(B) class is found on the Tn10 transposon and deposited under GenBank accession X00694, crossreferenced under gi43052, with encoded protein accession CAA25291, crossreferenced under gi43052 and UniProt accession PO4483. An example of the TetR(C) class is found on the pSC101 plasmid and deposited under GenBank Accession M36272, crossreferenced under gi150945, with encoded protein accession AAA25677, crossreferenced under gi150946. An example of the TetR(D) class is found in Salmonella ordonez and deposited under GenBank Accession X65876, crossreferenced under gi49073, with encoded protein accession CAA46707, crossreferenced under gi49075 and UniProt accessions POACT5 and P09164. An example of the TetR(E) class was isolated from E. coli transposon Tn10 and deposited under GenBank Accession M34933, crossreferenced under gi155019, with encoded protein accession AAA98409, crossreferenced under gi155020. An example of the TetR(G) class was isolated from Vibrio anguillarium and deposited under GenBank Accession S52438, crossreferenced under gi262928, with encoded protein accession AAB24797, crossreferenced under gi262929. An example of the TetR(H) class is found on plasmid pMV111 isolated from Pasteurella multocida and deposited under GenBank Accession 000792, crossreferenced under gi392871, with encoded protein accession AAC43249, crossreferenced under gi392872. An example of the TetR(J) class was isolated from Proteus mirabilis and deposited under GenBank Accession AF038993, crossreferenced under gi4104704, with encoded protein accession AAD12754, crossreferenced under gi4104706. An example of the TetR(Z) class was found on plasmid pAGI isolated from Corynebacterium glutamicum and deposited under GenBank Accession AF121000, crossreferenced under gi4583389, with encoded protein accession AAD25064, crossreferenced under gi4583390. In some examples the wild type tetracycline repressor is a class B tetracycline repressor protein. In some examples the wild type tetracycline repressor is a class D tetracycline repressor protein.

[0074] In some examples the sulfonylurea repressor (SuR) polypeptides comprise an amino acid substitution in the ligand binding domain of a wild type tetracycline repressor protein. In class B and D wild type TetR proteins, amino acid residues 6-52 represent the DNA binding domain. The remainder of the protein is involved in ligand binding and subsequent allosteric modification. For class B TetR residues 53-207 represent the ligand binding domain, while residues 53-218 comprise the ligand binding domain for the class D TetR. In some examples the SuR polypeptides comprise an amino acid substitution in the ligand binding domain of a wild type TetR(B) protein. In some examples the SuR polypeptides comprise an amino acid substitution in the ligand binding domain of a wild type TetR(B) protein of SEQ ID NO:1.

[0075] In some examples the isolated SuR polypeptides comprise an amino acid, or any combination of amino acids, corresponding to equivalent amino acid positions selected from the amino acid diversity shown in FIG. 1, wherein the amino acid residue position shown in FIG. 1 corresponds to the amino acid numbering of a wild type TetR(B). In some examples the isolated SuR polypeptides comprise a ligand binding domain comprising at least 10%, 20%, 30%, 40%, 50%, 55%, 60%, 65%, 66%, 67%, 68%, 69%, 70%, 71%, 72%, 73%, 74%, 75%, 76%, 77%, 78%, 79%, 80%, 81%, 82%, 83%, 84%, 85%, 86%, 87%, 88%, 89%, 90%, 91%, 92%, 93%, 94%, 95%, 96%, 97%, 98%, 99% or 100% of the amino acid residues shown in FIG. 1, wherein the amino acid residue position corresponds to the equivalent position using the amino acid numbering of a wild type TetR(B). In some examples the isolated SuR polypeptides comprise at least 10%, 20%, 30%, 40%, 50%, 55%, 60%, 65%, 66%, 67%, 68%, 69%, 70%, 71%, 72%, 73%, 74%, 75%, 76%, 77%, 78%, 79%, 80%, 81%, 82%, 83%, 84%, 85%, 86%, 87%, 88%, 89%, 90%, 91%, 92%, 93%, 94%, 95%, 96%, 97%, 98%, 99% or 100% of the amino acid residues shown in FIG. 1, wherein the amino acid residue position corresponds to the equivalent position using the amino acid numbering of a wild type TetR(B). In some examples the wild type TetR(B) is SEQ ID NO:1.

[0076] In some examples the isolated SuR polypeptide comprises a ligand binding domain comprising an amino acid substitution at a residue position selected from the group consisting of position 55, 60, 64, 67, 82, 86, 100, 104, 105, 108, 113, 116, 134, 135, 138, 139, 147, 151, 170, 173, 174, 177 and any combination thereof, wherein the amino acid residue position and substitution corresponds to the equivalent position using the amino acid numbering of a wild type TetR(B). In some examples the isolated SuR polypeptide further comprises an amino acid substitution at a residue position selected from the group consisting of 109, 112, 117, 131, 137, 140, 164 and any combination thereof. In some examples the wild type TetR(B) is SEQ ID NO:1.

[0077] In some examples the isolated SuR polypeptide has at least about 50% 60%, 65%, 66%, 67%, 68%, 69%, 70%, 71%, 72%, 73%, 74%, 75%, 76%, 77%, 78%, 79%, 80%, 81%, 82%, 83%, 84%, 85%, 86%, 87%, 88%, 89%, 90%, 91%, 92%, 93%, 94%, 95%, 96%, 97%, 98% or 99% sequence identity to the ligand binding domain of a wild type TetR(B) exemplified by amino acid residues 53-207 of SEQ ID NO:1, wherein the sequence identity is determined over the full length of the ligand binding domain using a global alignment method. In some examples the global alignment method uses the GAP algorithm with default parameters for an amino acid sequence % identity and % similarity using GAP Weight of 8 and Length Weight of 2, and the BLOSUM62 scoring matrix.

[0078] In some examples the isolated SuR polypeptide has at least about 50% 60%, 65%, 66%, 67%, 68%, 69%, 70%, 71%, 72%, 73%, 74%, 75%, 76%, 77%, 78%, 79%, 80%, 81%, 82%, 83%, 84%, 85%, 86%, 87%, 88%, 89%, 90%, 91%, 92%, 93%, 94%, 95%, 96%, 97%, 98% or 99% sequence identity to a wild type TetR(B) exemplified by SEQ ID NO:1, wherein the sequence identity is determined over the full length of the polypeptide using a global alignment method. In some examples the global alignment method uses the GAP algorithm with default parameters for an amino acid sequence % identity and % similarity using GAP Weight of 8 and Length Weight of 2, and the BLOSUM62 scoring matrix.

[0079] Compositions include isolated SuR polypeptides having at least about 50% 60%, 65%, 66%, 67%, 68%, 69%, 70%, 71%, 72%, 73%, 74%, 75%, 76%, 77%, 78%, 79%, 80%, 81%, 82%, 83%, 84%, 85%, 86%, 87%, 88%, 89%, 90%, 91%, 92%, 93%, 94%, 95%, 96%, 97%, 98% or 99% sequence identity to the ligand binding domain of a SuR polypeptide selected from the group consisting of SEQ ID NO:3-419, wherein the sequence identity is determined over the full length of the ligand binding domain using a global alignment method. In some examples the global alignment method uses the GAP algorithm with default parameters for an amino acid sequence % identity and % similarity using GAP Weight of 8 and Length Weight of 2, and the BLOSUM62 scoring matrix.

[0080] In some examples the isolated SuR polypeptide have at least about 50% 60%, 65%, 66%, 67%, 68%, 69%, 70%, 71%, 72%, 73%, 74%, 75%, 76%, 77%, 78%, 79%, 80%, 81%, 82%, 83%, 84%, 85%, 86%, 87%, 88%, 89%, 90%, 91%, 92%, 93%, 94%, 95%, 96%, 97%, 98% or 99% sequence identity to a SuR polypeptide selected from the group consisting of SEQ ID NO:3-419, wherein the sequence identity is determined over the full length of the polypeptide using a global alignment method. In some examples the global alignment method uses the GAP algorithm with default parameters for an amino acid sequence % identity and % similarity using GAP Weight of 8 and Length Weight of 2, and the BLOSUM62 scoring matrix.

[0081] In some examples the SuR polypeptides comprise an amino acid sequence that can be optimally aligned with a polypeptide sequence of L7-1A04 (SEQ ID NO:220), L1-22 (SEQ ID NO:7), L1-29 (SEQ ID NO:10), L1-02 (SEQ ID NO:3), L1-07 (SEQ ID NO:4), L1-20 (SEQ ID NO:6), L1-44 (SEQ ID NO:13), L6-3A09 (SEQ ID NO:402), L6-3H02 (SEQ ID NO:94), L7-4E03 (SEQ ID NO:403), L10-84(B12) (SEQ ID NO:404), or L13-46 (SEQ ID NO:405) to generate a BLAST bit score of at least 200, 250, 275, 300, 325, 350, 375, 400, 425, 450, 475, 500, 525, 550, 575, 600, 625, 650, 675, 700, or 750, wherein the BLAST alignment used the BLOSUM62 matrix, a gap existence penalty of 11, and a gap extension penalty of 1. In some examples the SuR polypeptides comprise an amino acid sequence that can be optimally aligned with a polypeptide sequence of L7-1A04 (SEQ ID NO:220) to generate a BLAST bit score of at least 374, optimally aligned with a polypeptide sequence of L1-22 (SEQ ID NO:7) to generate a BLAST bit score of at least 387, optimally aligned with a polypeptide sequence of L1-29 (SEQ ID NO:10) to generate a BLAST bit score of at least 393, optimally aligned with a polypeptide sequence of L1-07 (SEQ ID NO:4) to generate a BLAST bit score of at least 388, optimally aligned with a polypeptide sequence of L6-3A09 (SEQ ID NO:402) to generate a BLAST bit score of at least 381, optimally aligned with a polypeptide sequence of L7-4E03 (SEQ ID NO:403) to generate a BLAST bit score of at least 368, or optimally aligned with a polypeptide sequence of L13-46 (SEQ ID NO:405) to generate a BLAST bit score of at least 320, wherein the BLAST alignment used the BLOSUM62 matrix, a gap existence penalty of 11, and a gap extension penalty of 1. In some examples the SuR polypeptides comprise an amino acid sequence that can be optimally aligned with a polypeptide sequence of L7-1A04 (SEQ ID NO:220), L1-22 (SEQ ID NO:7), L1-29 (SEQ ID NO:10), L1-02 (SEQ ID NO:3), L1-07 (SEQ ID NO:4), L1-20 (SEQ ID NO:6), L1-44 (SEQ ID NO:13), L6-3A09 (SEQ ID NO:402), L6-3H02 (SEQ ID NO:94), L7-4E03 (SEQ ID NO:403), L10-84(B12) (SEQ ID NO:404), or L13-46 (SEQ ID NO:405) to generate a percent sequence identity of at least 50% 60%, 65%, 66%, 67%, 68%, 69%, 70%, 71%, 72%, 73%, 74%, 75%, 76%, 77%, 78%, 79%, 80%, 81%, 82%, 83%, 84%, 85%, 86%, 87%, 88%, 89%, 90%, 91%, 92%, 93%, 94%, 95%, 96%, 97%, 98% or 99% sequence identity, wherein the sequence identity is determined by BLAST alignment using the BLOSUM62 matrix, a gap existence penalty of 11, and a gap extension penalty of 1. In some examples the SuR polypeptides comprise an amino acid sequence that can be optimally aligned with a polypeptide sequence of L7-1A04 (SEQ ID NO:220) to generate a percent sequence identity of at least 88% sequence identity, optimally aligned with a polypeptide sequence of L1-22 (SEQ ID NO:7) to generate a percent sequence identity of at least 92% sequence identity, optimally aligned with a polypeptide sequence of L1-07 (SEQ ID NO:4) to generate a percent sequence identity of at least 93% sequence identity, optimally aligned with a polypeptide sequence of L1-20 (SEQ ID NO:6) to generate a percent sequence identity of at least 93% sequence identity, optimally aligned with a polypeptide sequence of L1-44 (SEQ ID NO:13) to generate a percent sequence identity of at least 93% sequence identity, optimally aligned with a polypeptide sequence of L6-3H02 (SEQ ID NO:94) to generate a percent sequence identity of at least 90% sequence identity, optimally aligned with a polypeptide sequence of L10-84(B12) (SEQ ID NO:404) to generate a percent sequence identity of at least 86% sequence identity, or optimally aligned with a polypeptide sequence of L13-46 (SEQ ID NO:405) to generate a percent sequence identity of at least 86% sequence identity, wherein the sequence identity is determined by BLAST alignment using the BLOSUM62 matrix, a gap existence penalty of 11, and a gap extension penalty of 1. In some examples the percent identity is determined using a global alignment method using the GAP algorithm with default parameters for an amino acid sequence % identity and % similarity using GAP Weight of 8 and Length Weight of 2, and the BLOSUM62 scoring matrix. In some examples the SuR polypeptides comprise an amino acid sequence that can be optimally aligned with a polypeptide sequence of L7-1A04 (SEQ ID NO:220), L1-22 (SEQ ID NO:7), L1-29 (SEQ ID NO:10), L1-02 (SEQ ID NO:3), L1-07 (SEQ ID NO:4), L1-20 (SEQ ID NO:6), L1-44 (SEQ ID NO:13), L6-3A09 (SEQ ID NO:402), L6-3H02 (SEQ ID NO:94), L7-4E03 (SEQ ID NO:403), L10-84(B12) (SEQ ID NO:404), or L13-46 (SEQ ID NO:405) to generate a BLAST similarity score of at least 400, 425, 450, 475, 500, 525, 550, 575, 600, 625, 650, 675, 700, 750, 800, 850, 900, 910, 920, 930, 940, 950, 960, 970, 980, 990, 1000, 1010, 1020, 1030, 1040, 1050, 1060, 1070, 1080, 1090, 1100, 1110, 1120, 1130, 1140, 1150, 1160, 1170, 1180, 1190, or 1200 wherein the BLAST alignment used the BLOSUM62 matrix, a gap existence penalty of 11, and a gap extension penalty of 1. In some examples the SuR polypeptides comprise an amino acid sequence that can be optimally aligned with a polypeptide sequence of L1-29 (SEQ ID NO:10) to generate a BLAST similarity score of at least 1006, optimally aligned with a polypeptide sequence of L1-07 (SEQ ID NO:4) to generate a BLAST similarity score of at least 996, optimally aligned with a polypeptide sequence of L6-3A09 (SEQ ID NO:402) to generate a BLAST similarity score of at least 978, optimally aligned with a polypeptide sequence of L7-4E03 (SEQ ID NO:403) to generate a BLAST similarity score of at least 945, or optimally aligned with a polypeptide sequence of L13-46 (SEQ ID NO:405) to generate a BLAST similarity score of at least 819, wherein the BLAST alignment used the BLOSUM62 matrix, a gap existence penalty of 11, and a gap extension penalty of 1. In some examples the SuR polypeptides comprise an amino acid sequence that can be optimally aligned with a polypeptide sequence of L7-1A04 (SEQ ID NO:220), L1-22 (SEQ ID NO:7), L1-29 (SEQ ID NO:10), L1-02 (SEQ ID NO:3), L1-07 (SEQ ID NO:4), L1-20 (SEQ ID NO:6), L1-44 (SEQ ID NO:13), L6-3A09 (SEQ ID NO:402), L6-3H02 (SEQ ID NO:94), L7-4E03 (SEQ ID NO:403), L10-84(B12) (SEQ ID NO:404), or L13-46 (SEQ ID NO:405) to generate a BLAST e-value score of at least e-60, e-70, e-75, e-80, e-85, e-90, e-95, e-100, e-105, e-106, e-107, e-108, e-109, e-110, e-111, e-112, e-113, e-114, e-115, e-116, e-117, e-118, e-119, e-120, or e-125, wherein the BLAST alignment used the BLOSUM62 matrix, a gap existence penalty of 11, and a gap extension penalty of 1. In some examples the SuR polypeptides comprise an amino acid sequence that can be optimally aligned with a polypeptide sequence of L1-02 (SEQ ID NO:3) to generate a BLAST e-value score of at least e-112, optimally aligned with a polypeptide sequence of L1-07 (SEQ ID NO:4) to generate a BLAST e-value score of at least e-111 , optimally aligned with a polypeptide sequence of L1-20 (SEQ ID NO:6) to generate a BLAST e-value score of at least e-111 , optimally aligned with a polypeptide sequence of L6-3A09 (SEQ ID NO:402) to generate a BLAST e-value score of at least e-108, optimally aligned with a polypeptide sequence of L7-4E03 (SEQ ID NO:403) to generate a BLAST e-value score of at least e-105, or optimally aligned with a polypeptide sequence of L13-46 (SEQ ID NO:405) to generate a BLAST e-value score of at least e-90 ,wherein the BLAST alignment used the BLOSUM62 matrix, a gap existence penalty of 11, and a gap extension penalty of 1. In some examples the polypeptide is selected from the group consisting of SEQ ID NO:3-419.

[0082] In some examples the isolated SuR polypeptides comprise a ligand binding domain from a polypeptide selected from the group consisting of SEQ ID NO:3-419. In some examples the isolated SuR polypeptides comprise an amino acid sequence selected from the group consisting of SEQ ID NO:3-419. In some examples the isolated SuR polypeptide is selected from the group consisting of SEQ ID NO:3-419, and the sulfonylurea compound is selected from the group consisting of a chlorsulfuron, an ethametsulfuron, a metsulfuron, a sulfometuron, a tribenuron, a chlorimuron, a nicosulfuron, a rimsulfuron and a thifensulfuron.

[0083] In some examples the isolated SuR polypeptides have an equilibrium binding constant for a sulfonylurea compound greater than 0.1 nM and less than 10 μM. In some examples the isolated SuR polypeptide has an equilibrium binding constant for a sulfonylurea compound of at least 0.1 nM, 0.5 nM, 1 nM, 10 nM, 50 nM, 100 nM, 250 nM, 500 nM, 750 nM, 1 μM, 5 μM, 7 μM but less than 10 μM. In some examples the isolated SuR polypeptide has an equilibrium binding constant for a sulfonylurea compound of at least 0.1 nM, 0.5 nM, 1 nM, 10 nM, 50 nM, 100 nM, 250 nM, 500 nM, 750 nM but less than 1 μM. In some examples the isolated SuR polypeptide has an equilibrium binding constant for a sulfonylurea compound greater than 0 nM, but less than 0.1 nM, 0.5 nM, 1 nM, 10 nM, 50 nM, 100 nM, 250 nM, 500 nM, 750 nM, 1 μM, 5 μM, 7 μM or 10 μM. In some examples the sulfonylurea compound is a chlorsulfuron, an ethametsulfuron, a metsulfuron, a sulfometuron, a tribenuron, a chlorimuron, a nicosulfuron, a rimsulfuron and/or a thifensulfuron.

[0084] In some examples the isolated SuR polypeptides have an equilibrium binding constant for an operator sequence greater than 0.1 nM and less than 10 μM. In some examples the isolated SuR polypeptide has an equilibrium binding constant for an operator sequence of at least 0.1 nM, 0.5 nM, 1 nM, 10 nM, 50 nM, 100 nM, 250 nM, 500 nM, 750 nM, 1 μM, 5 μM, 7 μM but less than 10 μM. In some examples the isolated SuR polypeptide has an equilibrium binding constant for an operator sequence of at least 0.1 nM, 0.5 nM, 1 nM, 10 nM, 50 nM, 100 nM, 250 nM, 500 nM, 750 nM but less than 1 μM. In some examples the isolated SuR polypeptide has an equilibrium binding constant for an operator sequence greater than 0 nM, but less than 0.1 nM, 0.5 nM, 1 nM, 10 nM, 50 nM, 100 nM, 250 nM, 500 nM, 750 nM, 1 μM, 5 μM, 7 μM or 10 μM. In some examples the operator sequence is a Tet operator sequence. In some examples the Tet operator sequence is a TetR(A) operator sequence, a TetR(B) operator sequence, a TetR(D) operator sequence, TetR(E) operator sequence, a TetR(H) operator sequence, or a functional derivative thereof.

[0085] The isolated SuR polypeptides specifically bind to a sulfonylurea compound. Sulfonylurea molecules comprise a sulfonylurea moiety (—S(O)2NHC(O)NH(R)—). In sulfonylurea herbicides the sulfonyl end of the sulfonylurea moiety is connected either directly or by way of an oxygen atom or an optionally substituted amino or methylene group to a typically substituted cyclic or acyclic group. At the opposite end of the sulfonylurea bridge, the amino group, which may have a substituent such as methyl (R being CH3) instead of hydrogen, is connected to a heterocyclic group, typically a symmetric pyrimidine or triazine ring, having one or two substituents such as methyl, ethyl, trifluoromethyl, methoxy, ethoxy, methylamino, dimethylamino, ethylamino and the halogens. Sulfonylurea herbicides can be in the form of the free acid or a salt. In the free acid form the sulfonamide nitrogen on the bridge is not deprotonated (i.e., —S(O)2NHC(O)NH(R)—), while in the salt form the sulfonamide nitrogen atom on the bridge is deprotonated (i.e., —S(O)2NC(O)NH(R)—), and a cation is present, typically of an alkali metal or alkaline earth metal, most commonly sodium or potassium. Sulfonylurea compounds include, for example, compound classes such as pyrimidinylsulfonylurea compounds, triazinylsulfonylurea compounds, thiadiazolylurea compounds, and pharmaceuticals such as antidiabetic drugs, as well as salts and other derivatives thereof. Examples of pyrimidinylsulfonylurea compounds include amidosulfuron, azimsulfuron, bensulfuron, bensulfuron-methyl, chlorimuron, chlorimuron-ethyl, cyclosulfamuron, ethoxysulfuron, flazasulfuron, flucetosulfuron, flupyrsulfuron, flupyrsulfuron-methyl, foramsulfuron, halosulfuron, halosulfuron-methyl, imazosulfuron, mesosulfuron, mesosulfuron-methyl, nicosulfuron, orthosulfamuron, oxasulfuron, primisulfuron, primisulfuron-methyl, pyrazosulfuron, pyrazosulfuron-ethyl, rimsulfuron, sulfometuron, sulfometuron-methyl, sulfosulfuron, trifloxysulfuron and salts and derivatives thereof. Examples of triazinylsulfonylurea compounds include chlorsulfuron, cinosulfuron, ethametsulfuron, ethametsulfuron-methyl, iodosulfuron, iodosulfuron-methyl, metsulfuron, metsulfuron-methyl, prosulfuron, thifensulfuron, thifensulfuron-methyl, triasulfuron, tribenuron, tribenuron-methyl, triflusulfuron, triflusulfuron-methyl, tritosulfuron and salts and derivatives thereof. Examples of thiadiazolylurea compounds include buthiuron, ethidimuron, tebuthiuron, thiazafluron, thidiazuron and salts and derivatives thereof. Examples of antidiabetic drugs include acetohexamide, chlorpropamide, tolbutamide, tolazamide, glipizide, gliclazide, glibenclamide (glyburide), gliquidone, glimepiride and salts and derivatives thereof. In some examples the isolated SuR polypeptides specifically bind to more than one sulfonylurea compound. In some examples the sulfonylurea compound is selected from the group consisting of chlorsulfuron, ethametsulfuron-methyl, metsulfuron-methyl, thifensulfuron-methyl, sulfometuron-methyl, tribenuron-methyl, chlorimuron-ethyl, nicosulfuron, and rimsulfuron.

[0086] Compositions also include isolated polynucleotides encoding SuR polypeptides that specifically bind to a tetracycline operator, wherein the specific binding is regulated by a sulfonylurea compound. In some examples the isolated polynucleotides encode sulfonylurea repressor (SuR) polypeptides comprising an amino acid substitution in the ligand binding domain of a wild type tetracycline repressor protein. In class B and D wild type TetR proteins, amino acid residues 6-52 represent the DNA binding domain. The remainder of the protein is involved in ligand binding and subsequent allosteric modification. For class B TetR residues 53-207 represent the ligand binding domain, while residues 53-218 comprise the ligand binding domain for the class D TetR. In some examples the isolated polynucleotides encode SuR polypeptides comprising an amino acid substitution in the ligand binding domain of a wild type TetR(B) protein. In some examples the polynucleotides encode SuR polypeptides comprising an amino acid substitution in the ligand binding domain of a wild type TetR(B) protein of SEQ ID NO:1.

[0087] In some examples the isolated polynucleotides encode SuR polypeptides comprising an amino acid, or any combination of amino acids, selected from the amino acid diversity shown in FIG. 1, wherein the amino acid residue position corresponds to the equivalent position using the amino acid numbering of a wild type TetR(B) exemplified by SEQ ID NO:1. In some examples the isolated polynucleotides encode SuR polypeptides comprising a ligand binding domain comprising at least 10%, 20%, 30%, 40%, 50%, 55%, 60%, 65%, 66%, 67%, 68%, 69%, 70%, 71%, 72%, 73%, 74%, 75%, 76%, 77%, 78%, 79%, 80%, 81%, 82%, 83%, 84%, 85%, 86%, 87%, 88%, 89%, 90%, 91%, 92%, 93%, 94%, 95%, 96%, 97%, 98%, 99% or 100% of the amino acid residues shown in FIG. 1, wherein the amino acid residue position corresponds to the equivalent position using the amino acid numbering of wild type TetR(B). In some examples the isolated polynucleotides encode SuR polypeptides comprising at least 10%, 20%, 30%, 40%, 50%, 55%, 60%, 65%, 66%, 67%, 68%, 69%, 70%, 71%, 72%, 73%, 74%, 75%, 76%, 77%, 78%, 79%, 80%, 81%, 82%, 83%, 84%, 85%, 86%, 87%, 88%, 89%, 90%, 91%, 92%, 93%, 94%, 95%, 96%, 97%, 98%, 99% or 100% of the amino acid residues shown in FIG. 1, wherein the amino acid residue position corresponds to the equivalent position using the amino acid numbering of wild type TetR(B). In some examples the wild type TetR(B) is SEQ ID NO:1.

[0088] In some examples the isolated polynucleotides encode SuR polypeptides comprising a ligand binding domain comprising an amino acid substitution at a residue position selected from the group consisting of position 55, 60, 64, 67, 82, 86, 100, 104, 105, 108, 113, 116, 134, 135, 138, 139, 147, 151, 170, 173, 174, 177 and any combination thereof, wherein the amino acid residue position and substitution corresponds to the equivalent position using the amino acid numbering of a wild type TetR(B). In some examples the isolated polynucleotides encode SuR polypeptides further comprising an amino acid substitution at a residue position selected from the group consisting of 109, 112, 117, 131, 137, 140, 164 and any combination thereof. In some examples the wild type TetR(B) polypeptide sequence is SEQ ID NO:1.

[0089] In some examples the isolated polynucleotides encode SuR polypeptides having at least about 50% 60%, 65%, 66%, 67%, 68%, 69%, 70%, 71%, 72%, 73%, 74%, 75%, 76%, 77%, 78%, 79%, 80%, 81%, 82%, 83%, 84%, 85%, 86%, 87%, 88%, 89%, 90%, 91%, 92%, 93%, 94%, 95%, 96%, 97%, 98% or 99% sequence identity to the ligand binding domain shown as amino acid residues 53-207 of SEQ ID NO:1, wherein the sequence identity is determined over the full length of the ligand binding domain using a global alignment method. In some examples the global alignment method is GAP, wherein the default parameters are for an amino acid sequence % identity and % similarity using a GAP Weight of 8 and a Length Weight of 2, and the BLOSUM62 scoring matrix.

[0090] In some examples the isolated polynucleotides encode SuR polypeptides having at least about 50% 60%, 65%, 66%, 67%, 68%, 69%, 70%, 71%, 72%, 73%, 74%, 75%, 76%, 77%, 78%, 79%, 80%, 81%, 82%, 83%, 84%, 85%, 86%, 87%, 88%, 89%, 90%, 91%, 92%, 93%, 94%, 95%, 96%, 97%, 98% or 99% sequence identity to SEQ ID NO:1, wherein the sequence identity is determined over the full length of the polypeptide using a global alignment method. In some examples the global alignment method is GAP, wherein the default parameters are for an amino acid sequence % identity and % similarity using a GAP Weight of 8 and a Length Weight of 2, and the BLOSUM62 scoring matrix.

[0091] In some examples the isolated polynucleotides include nucleic acid sequences that selectively hybridize under stringent hybridization conditions to a polynucleotide encoding a SuR polypeptide. Polynucleotides that selectively hybridize are polynucleotides which bind to a target sequence at a level of at least 2-fold over background as compared to hybridization to a non-target sequence. Stringent conditions are sequence-dependent and condition-dependent. Typical stringent conditions are those in which the salt concentration about 0.01 to 1.0 M at pH 7.0-8.3 at 30° C. for short probes (e.g., 10 to 50 nucleotides) or about 60° C. for long probes (e.g., greater than 50 nucleotides). Stringent conditions may include formamide or other destabilizing agents. Exemplary moderate stringency conditions include hybridization in 40 to 45% formamide, 1 M NaCl, 1% SDS at 37° C., and a wash in 0.5× to 1×SSC at 55 to 60° C. Exemplary high stringency conditions include hybridization in 50% formamide, 1 M NaCl, 1% SDS at 37° C., and a wash in 0.1×SSC at 60 to 65° C.

[0092] Specificity is impacted by post-hybridization wash conditions, typically via ionic strength and temperature. For DNA-DNA hybrids, the Tₘ can be approximated from the equation of Meinkoth & Wahl (1984) Anal Biochem 138:267-284: Tₘ=81.5° C.+16.6 (log M)+0.41 (% GC)−0.61 (% form)−500/L; where M is the molarity of monovalent cations, % GC is the percentage of guanosine and cytosine nucleotides in the DNA, % form is the percentage of formamide in the hybridization solution, and L is the length of the hybrid in base pairs. An extensive guide to the hybridization of nucleic acids is found in Tijssen, Laboratory Techniques in Biochemistry and Molecular Biology—Hybridization with Nucleic Acid Probes, Part I, Chapter 2 “Overview of principles of hybridization and the strategy of nucleic acid probe assays”, Elsevier, New York (1993); and Current Protocols in Molecular Biology, Chapter 2, Ausubel, et al., Eds., Greene Publishing and Wiley-Interscience, New York (1995). In some examples, the isolated polynucleotides encoding SuR polypeptides specifically hybridize to a polynucleotide of SEQ ID NO:420-836 under moderately stringent conditions or under highly stringent conditions.

[0093] In some examples the isolated polynucleotide encodes a SuR polypeptide comprising an amino acid sequence that can be optimally aligned with a polypeptide sequence of L7-1A04 (SEQ ID NO:220), L1-22 (SEQ ID NO:7), L1-29 (SEQ ID NO:10), L1-02 (SEQ ID NO:3), L1-07 (SEQ ID NO:4), L1-20 (SEQ ID NO:6), L1-44 (SEQ ID NO:13), L6-3A09 (SEQ ID NO:402), L6-3H02 (SEQ ID NO:94), L7-4E03 (SEQ ID NO:403), L10-84(B12) (SEQ ID NO:404), or L13-46 (SEQ ID NO:405) to generate a BLAST bit score of at least 200, 250, 275, 300, 325, 350, 375, 400, 425, 450, 475, 500, 525, 550, 575, 600, 625, 650, 675, 700, or 750, wherein the BLAST alignment used the BLOSUM62 matrix, a gap existence penalty of 11, and a gap extension penalty of 1. In some examples the isolated polynucleotide encodes a SuR polypeptide comprising an amino acid sequence that can be optimally aligned with a polypeptide sequence of L7-1A04 (SEQ ID NO:220) to generate a BLAST bit score of at least 374, optimally aligned with a polypeptide sequence of L1-22 (SEQ ID NO:7) to generate a BLAST bit score of at least 387, optimally aligned with a polypeptide sequence of L1-29 (SEQ ID NO:10) to generate a BLAST bit score of at least 393, optimally aligned with a polypeptide sequence of L1-07 (SEQ ID NO:4) to generate a BLAST bit score of at least 388, optimally aligned with a polypeptide sequence of L6-3A09 (SEQ ID NO:402) to generate a BLAST bit score of at least 381, optimally aligned with a polypeptide sequence of L7-4E03 (SEQ ID NO:403) to generate a BLAST bit score of at least 368, or optimally aligned with a polypeptide sequence of L13-46 (SEQ ID NO:405) to generate a BLAST bit score of at least 320, wherein the BLAST alignment used the BLOSUM62 matrix, a gap existence penalty of 11, and a gap extension penalty of 1. In some examples the isolated polynucleotide encodes a SuR polypeptides comprising an amino acid sequence that can be optimally aligned with a polypeptide sequence of L7-1A04 (SEQ ID NO:220), L1-22 (SEQ ID NO:7), L1-29 (SEQ ID NO:10), L1-02 (SEQ ID NO:3), L1-07 (SEQ ID NO:4), L1-20 (SEQ ID NO:6), L1-44 (SEQ ID NO:13), L6-3A09 (SEQ ID NO:402), L6-3H02 (SEQ ID NO:94), L7-4E03 (SEQ ID NO:403), L10-84(B12) (SEQ ID NO:404), or L13-46 (SEQ ID NO:405) to generate a percent sequence identity of at least 50% 60%, 65%, 66%, 67%, 68%, 69%, 70%, 71%, 72%, 73%, 74%, 75%, 76%, 77%, 78%, 79%, 80%, 81%, 82%, 83%, 84%, 85%, 86%, 87%, 88%, 89%, 90%, 91%, 92%, 93%, 94%, 95%, 96%, 97%, 98% or 99% sequence identity, wherein the sequence identity is determined by BLAST alignment using the BLOSUM62 matrix, a gap existence penalty of 11, and a gap extension penalty of 1. In some examples the isolated polynucleotide encodes a SuR polypeptide comprising an amino acid sequence that can be optimally aligned with a polypeptide sequence of L7-1A04 (SEQ ID NO:220) to generate a percent sequence identity of at least 88% sequence identity, optimally aligned with a polypeptide sequence of L1-22 (SEQ ID NO:7) to generate a percent sequence identity of at least 92% sequence identity, optimally aligned with a polypeptide sequence of L1-07 (SEQ ID NO:4) to generate a percent sequence identity of at least 93% sequence identity, optimally aligned with a polypeptide sequence of L1-20 (SEQ ID NO:6) to generate a percent sequence identity of at least 93% sequence identity, optimally aligned with a polypeptide sequence of L1-44 (SEQ ID NO:13) to generate a percent sequence identity of at least 93% sequence identity, optimally aligned with a polypeptide sequence of L6-3H02 (SEQ ID NO:94) to generate a percent sequence identity of at least 90% sequence identity, optimally aligned with a polypeptide sequence of L10-84(B12) (SEQ ID NO:404) to generate a percent sequence identity of at least 86% sequence identity, or optimally aligned with a polypeptide sequence of L13-46 (SEQ ID NO:405) to generate a percent sequence identity of at least 86% sequence identity, wherein the sequence identity is determined by BLAST alignment using the BLOSUM62 matrix, a gap existence penalty of 11, and a gap extension penalty of 1. In some examples the percent identity is determined using a global alignment method using the GAP algorithm with default parameters for an amino acid sequence % identity and % similarity using GAP Weight of 8 and Length Weight of 2, and the BLOSUM62 scoring matrix. In some examples the isolated polynucleotide encodes a SuR polypeptide comprising an amino acid sequence that can be optimally aligned with a polypeptide sequence of L7-1A04 (SEQ ID NO:220), L1-22 (SEQ ID NO:7), L1-29 (SEQ ID NO:10), L1-02 (SEQ ID NO:3), L1-07 (SEQ ID NO:4), L1-20 (SEQ ID NO:6), L1-44 (SEQ ID NO:13), L6-3A09 (SEQ ID NO:402), L6-3H02 (SEQ ID NO:94), L7-4E03 (SEQ ID NO:403), L10-84(B12) (SEQ ID NO:404), or L13-46 (SEQ ID NO:405) to generate a BLAST similarity score of at least 400, 425, 450, 475, 500, 525, 550, 575, 600, 625, 650, 675, 600, 750, 800, 850, 900, 910, 920, 930, 940, 950, 960, 970, 980, 990, 1000, 1010, 1020, 1030, 1040, 1050, 1060, 1070, 1080, 1090, 1100, 1110, 1120, 1130, 1140, 1150, 1160, 1170, 1180, 1190, or 1200, wherein BLAST alignment used the BLOSUM62 matrix, a gap existence penalty of 11, and a gap extension penalty of 1. In some examples the isolated polynucleotide encodes a SuR polypeptide comprising an amino acid sequence that can be optimally aligned with a polypeptide sequence of L1-29 (SEQ ID NO:10) to generate a BLAST similarity score of at least 1006, optimally aligned with a polypeptide sequence of L1-07 (SEQ ID NO:4) to generate a BLAST similarity score of at least 996, optimally aligned with a polypeptide sequence of L6-3A09 (SEQ ID NO:402) to generate a BLAST similarity score of at least 978, optimally aligned with a polypeptide sequence of L7-4E03 (SEQ ID NO:403) to generate a BLAST similarity score of at least 945, or optimally aligned with a polypeptide sequence of L13-46 (SEQ ID NO:405) to generate a BLAST similarity score of at least 819, wherein the BLAST alignment used the BLOSUM62 matrix, a gap existence penalty of 11, and a gap extension penalty of 1. In some examples the isolated polynucleotide encodes a SUR polypeptide comprising an amino acid sequence that can be optimally aligned with a polypeptide sequence of L7-1A04 (SEQ ID NO:220), L1-22 (SEQ ID NO:7), L1-29 (SEQ ID NO:10), L1-02 (SEQ ID NO:3), L1-07 (SEQ ID NO:4), L1-20 (SEQ ID NO:6), L1-44 (SEQ ID NO:13), L6-3A09 (SEQ ID NO:402), L6-3H02 (SEQ ID NO:94), L7-4E03 (SEQ ID NO:403), L10-84(B12) (SEQ ID NO:404), or L13-46 (SEQ ID NO:405) to generate a BLAST e-value score of at least e-60, e-70, e-80, e-85, e-90, e-95, e-100, e-105, e-106, e-107, e-108, e-109, e-110, e-111, e-112, e-113, e-114, e-115, e-116, e-117, e-118, e-119, e-120, or e-125, wherein BLAST alignment used the BLOSUM62 matrix, a gap existence penalty of 11, and a gap extension penalty of 1. In some examples the isolated polynucleotide encodes a SuR polypeptide comprising SuR polypeptides comprise an amino acid sequence that can be optimally aligned with a polypeptide sequence of L1-02 (SEQ ID NO:3) to generate a BLAST e-value score of at least e-112, optimally aligned with a polypeptide sequence of L1-07 (SEQ ID NO:4) to generate a BLAST e-value score of at least e-111, optimally aligned with a polypeptide sequence of L1-20 (SEQ ID NO:6) to generate a BLAST e-value score of at least e-111, optimally aligned with a polypeptide sequence of L6-3A09 (SEQ ID NO:402) to generate a BLAST e-value score of at least e-108, optimally aligned with a polypeptide sequence of L7-4E03 (SEQ ID NO:403) to generate a BLAST e-value score of at least e-105 , or optimally aligned with a polypeptide sequence of L13-46 (SEQ ID NO:405) to generate a BLAST e-value score of at least e-90 ,wherein the BLAST alignment used the BLOSUM62 matrix, a gap existence penalty of 11, and a gap extension penalty of 1. In some examples the isolated polynucleotide encodes a polypeptide selected from the group consisting of SEQ ID NO:3-419. In some examples the isolated polynucleotide comprises a polynucleotide sequence of SEQ ID NO:420-836, or the complementary polynucleotide thereof.

[0094] In some examples the isolated polynucleotide encodes a SuR polypeptide comprising a ligand binding domain from a polypeptide selected from the group consisting of SEQ ID NO:3-419. In some examples the isolated polynucleotide encodes a SuR polypeptide comprising an amino acid sequence selected from the group consisting of SEQ ID NO:3-419. In some examples the encoded SuR polypeptide is selected from the group consisting of SEQ ID NO:3-419, and the sulfonylurea compound is selected from the group consisting of chlorsulfuron, ethametsulfuron-methyl, metsulfuron-methyl, sulfometuron-methyl, and thifensulfuron-methyl. In some examples the isolated polynucleotide comprises a polynucleotide sequence of SEQ ID NO:420-836, or the complementary polynucleotide thereof.

[0095] In some examples the isolated SuR polynucleotide encodes a SuR polypeptide having an equilibrium binding constant for a sulfonylurea compound greater than 0.1 nM and less than 10 μM. In some examples the encoded SuR polypeptide has an equilibrium binding constant for a sulfonylurea compound of at least 0.1 nM, 0.5 nM, 1 nM, 10 nM, 50 nM, 100 nM, 250 nM, 500 nM, 750 nM, 1 μM, 5 μM, 7 μM but less than 10 μM. In some examples the encoded SuR polypeptide has an equilibrium binding constant for a sulfonylurea compound of at least 0.1 nM, 0.5 nM, 1 nM, 10 nM, 50 nM, 100 nM, 250 nM, 500 nM, 750 nM but less than 1 μM. In some examples the encoded SuR polypeptide has an equilibrium binding constant for a sulfonylurea compound greater than 0 nM, but less than 0.1 nM, 0.5nM, 1 nM, 10 nM, 50 nM, 100 nM, 250 nM, 500 nM, 750 nM, 1 μM, 5 μM, 7 μM, or 10 μM. In some examples the sulfonylurea compound is a chlorsulfuron, an ethametsulfuron, a metsulfuron, a sulfometuron, and/or a thifensulfuron compound.

[0096] In some examples the isolated SuR polynucleotide encodes a SuR polypeptide having an equilibrium binding constant for an operator sequence greater than 0.1 nM and less than 10 μM. In some examples the encoded SuR polypeptide has an equilibrium binding constant for an operator sequence of at least 0.1 nM, 0.5 nM, 1 nM, 10 nM, 50 nM, 100 nM, 250 nM, 500 nM, 750 nM, 1 μM, 5 μM, 7 μM but less than 10 μM. In some examples the encoded SuR polypeptide has an equilibrium binding constant for an operator sequence of at least 0.1 nM, 0.5 nM, 1 nM, 10 nM, 50 nM, 100 nM, 250 nM, 500 nM, 750 nM but less than 1 μM. In some examples the encoded SuR polypeptide has an equilibrium binding constant for an operator sequence greater than 0 nM, but less than 0.1 nM, 0.5 nM, 1 nM, 10 nM, 50 nM, 100 nM, 250 nM, 500 nM, 750 nM, 1 μM, 5 μM, 7 μM or 10 μM. In some examples the operator sequence is a Tet operator sequence. In some examples the Tet operator sequence is a TetR(A) operator sequence, a TetR(B) operator sequence, a TetR(D) operator sequence, TetR(E) operator sequence, a TetR(H) operator sequence or a functional derivative thereof. In some examples the isolated polynucleotides encoding SuR polypeptides, recombinase, or a trait of interest comprise codon composition profiles representative of codon preferences for particular host cells, or host cell organelles. In some examples the isolated polynucleotides comprise prokaryote preferred codons. In some examples the isolated polynucleotides comprise bacteria preferred codons. In some examples the bacteria is E. coli or Agrobacterium. In some examples the isolated polynucleotides comprise plastid preferred codons. In some examples the isolated polynucleotides comprise eukaryote preferred codons. In some examples the isolated polynucleotides comprise nuclear preferred codons. In some examples the isolated polynucleotides comprise plant preferred codons. In some examples the isolated polynucleotides comprise monocotyledonous plant preferred codons. In some examples the isolated polynucleotides comprise corn, rice, sorghum, barley, wheat, rye, switch grass, sugarcane, turf grass and/or oat preferred codons. In some examples the isolated polynucleotides comprise dicotyledonous plant preferred codons. In some examples the isolated polynucleotides comprise soybean, sunflower, safflower, Brassica, alfalfa, Arabidopsis, tobacco and/or cotton preferred codons. In some examples the isolated polynucleotides comprise yeast preferred codons. In some examples the isolated polynucleotides comprise mammalian preferred codons. In some examples the isolated polynucleotides comprise insect preferred codons.

[0097] Compositions also include isolated polynucleotides fully complementary to a polynucleotide encoding a SuR polypeptide, expression cassettes, replicons, vectors, T-DNAs, DNA libraries, host cells, tissues and/or organisms comprising the polynucleotides encoding the SuR polypeptides and/or complements or derivatives thereof. In some examples the polynucleotide is stably incorporated into a genome of the host cell, tissue and/or organism. In some examples the host cell is a prokaryote, including E. coli and Agrobacterium strains. In some examples the host is a eukaryote, including for example yeast, insects, plants and mammals.

[0098] Repressible promoters comprising at least one operator sequence are also provided. Expression from these promoters is controlled by a repressor that binds to the operator sequence, wherein binding of the repressor to the operator is regulated by the presence or absence of chemical ligand. In some examples, the repressible promoter comprises at least one tet operator sequence. Repressors include tet repressors and sulfonylurea-regulated repressors. Binding of a tet repressor to a tet operator is regulated by tetracycline compounds and analogs thereof. Binding of a sulfonylurea-responsive repressor to a tet operator is controlled by sulfonylurea compounds and analogs thereof. In some examples, the repressible promoter comprises a tet operator sequence located within 0-30 nucleotides 5′ or 3′ of the TATA box. In some examples, the tet operator sequence is located within 20, 19, 18, 17, 16, 15, 14, 13, 12, 11, 10, 9, 8, 7, 6, 5, 4, 3, 2, 1, or 0 nt of the TATA box. In some examples the tet operator sequence may partially overlap with the TATA box sequence. In some examples the tet operator sequence is SEQ ID NO:848. In some examples the promoter is active in plant cells. In some examples the promoter is a constitutive promoter. In other examples the promoter is a non-constitutive promoter. In some examples the non-constitutive promoter is a tissue-preferred promoter. In some examples the tissue-preferred promoter is primarily expressed in roots, leaves, stems, flowers, silks, anthers, pollen, meristem, seed, endosperm, or embryos. In some examples the promoter is a plant actin promoter, a banana streak virus promoter (BSV), an MMV promoter, an enhanced MMV promoter (dMMV), a plant P450 promoter, or an elongation factor 1a (EF1A) promoter. In some examples the promoter is a plant actin promoter (SEQ ID NO:849), a banana streak virus promoter (BSV) (SEQ ID NO:850), a mirabilis mosaic virus promoter (MMV) (SEQ ID NO:851), an enhanced MMV promoter (dMMV) (SEQ ID NO:852), a plant P450 promoter (MP1) (SEQ ID NO:853), or an elongation factor 1a (EF1A) promoter (SEQ ID NO:854). In some examples, the repressible promoter comprises two tet operator sequences, wherein the 1^{st} tet operator sequence is located within 0-30 nt 5′ of the TATA box, and the 2^{nd} tet operator sequence is located within 0-30 nt 3′ of the TATA box. In some examples, the first and/or the second tet operator sequence is located within 20, 19, 18, 17, 16, 15, 14, 13, 12, 11, 10, 9, 8, 7, 6, 5, 4, 3, 2, 1, or 0 nt of the TATA box. In some examples the first and/or the second tet operator sequence may partially overlap with the TATA box sequence. In some examples the first and/or the second tet operator sequence is SEQ ID NO:848. In some examples, the repressible promoter comprises three tet operator sequences, wherein the 1^{st} tet operator sequence is located within 0-30 nt 5′ of the TATA box, and the 2^{nd} tet operator sequence is located within 0-30 nt 3′ of the TATA box, and the 3^{rd} tet operator is located with 0-50 nt of the transcriptional start site (TSS). In some examples, the 1^{st} and/or the 2^{nd} tet operator sequence is located within 20, 19, 18, 17, 16, 15, 14, 13, 12, 11, 10, 9, 8, 7, 6, 5, 4, 3, 2, 1, or 0 nt of the TATA box. In some examples, the 3^{rd} tet operator sequence is located within 50, 45, 40, 35, 30, 25, 20, 19, 18, 17, 16, 15, 14, 13, 12, 11, 10, 9, 8, 7, 6, 5, 4, 3, 2, 1, or 0 nt of the TSS. In some examples the 3^{rd} tet operator is located 5′ of the TSS. In some examples the 3^{rd} tet operator sequence may partially overlap with the TSS sequence. In some examples the 1^{st}, 2^{nd} and/or the 3^{rd} tet operator sequence is SEQ ID NO:848. In some examples the promoter is a plant actin promoter (actin/Op) (SEQ ID NO:855), a banana streak virus promoter (BSV/Op) (SEQ ID NO:856), a mirabilis mosaic virus promoter (MMV/Op) (SEQ ID NO:857), an enhanced MMV promoter (dMMV/Op) (SEQ ID NO:858), a plant P450 promoter (MP1/Op) (SEQ ID NO:859), or an elongation factor 1a (EF1A/Op) promoter (SEQ ID NO:860). In some examples, the promoter comprises a polynucleotide sequence having at least about 50%, 60%, 65%, 66%, 67%, 68%, 69%, 70%, 71%, 72%, 73%, 74%, 75%, 76%, 77%, 78%, 79%, 80%, 81%, 82%, 83%, 84%, 85%, 86%, 87%, 88%, 89%, 90%, 91%, 92%, 93%, 94%, 95%, 96%, 97%, 98%, or 99% sequence identity to SEQ ID NO:885, 856, 857, 858, 859, or 860, wherein the promoter retains repressible promoter activity. In a specific example, the promoter comprises a polynucleotide sequence having at least 95% sequence identity to SEQ ID NO:885, 856, 857, 858, 859, or 860, wherein the promoter retains repressible promoter activity. A promoter with “repressible promoter activity” will direct expression of an operably linked polynucleotide, wherein its ability to direct transcription depends on the presence or absence of a chemical ligand (i.e., a tetracycline compound, a sulfonylurea compound) and a repressor protein.

[0099] Methods using the gene switch compositions and/or elements thereof are further provided. In one example, methods of regulating transcription of a polynucleotide of interest in a host cell are provided, the methods comprising: providing a cell comprising the polynucleotide of interest operably linked to a repressible promoter comprising at least one tetracycline operator sequence; providing a SuR polypeptide and, providing a sulfonylurea compound, thereby regulating transcription of the polynucleotide of interest. Any host cell can be used, including for example prokaryotic cells such as bacteria, and eukaryotic cells, including yeast, plant, insect, and mammalian cells. In some examples providing the SuR polypeptide comprises contacting the cell with an expression cassette comprising a promoter functional in the cell operably linked to a polynucleotide that encodes the SuR polypeptide. In some examples the methods are used to activate expression of a polynucleotide of interest. In some examples expression of the polynucleotide of interest is activated in various tissues or cells, restricted to selected tissue or cell type, restricted to specific developmental stage(s), restricted to specific environmental conditions, and/or restricted to specific generation of a plant or progeny thereof. In some examples the polynucleotide of interest is primarily expressed in roots, leaves, stems, flowers, silks, anthers, pollen, meristem, germline, seed, endosperm, embryos, or progeny. In some examples expression of the polynucleotide of interest occurs primarily at specific times, which include but are not limited to seed or plant developmental stages, vegetative growth, reproductive cycle, response to environmental conditions, response to pest or pathogen presence, response to chemical compounds, or any combination thereof. In some examples expression of the polynucleotide of interest is reduced, inhibited, or blocked in various tissues or cells, which may be restricted to selected tissue or cell type, restricted to specific developmental stage(s), restricted to specific environmental conditions, and/or restricted to specific generation of a plant or progeny thereof. In some examples expression of the polynucleotide of interest is primarily inhibited in roots, leaves, stems, flowers, silks, anthers, pollen, meristem, germline, seed, endosperm, embryos, or progeny. In some examples expression of the polynucleotide of interest occurs primarily inhibited at specific times, which include but are not limited to seed or plant developmental stages, vegetative growth, reproductive cycle, response to environmental conditions, response to pest or pathogen presence, response to chemical compounds, or any combination thereof.

[0100] In another example, methods of regulating transcription of a polynucleotide of interest in a host cell are provided, the methods comprising: providing a cell comprising the polynucleotide of interest operably linked to a repressible promoter comprising at least one tetracycline operator sequence; providing a TetR polypeptide and, providing a tetracycline compound, thereby regulating transcription of the polynucleotide of interest. In some examples, the repressible promoter is a plant actin promoter, a banana streak virus promoter (BSV), an MMV promoter, an enhanced MMV promoter (dMMV), a plant P450 promoter, or an elongation factor 1a (EF1A) promoter. In some examples the promoter is a plant actin promoter (actin/Op) (SEQ ID NO:855), a banana streak virus promoter (BSV/Op) (SEQ ID NO:856), a mirabilis mosaic virus promoter (MMV/Op) (SEQ ID NO:857), an enhanced MMV promoter (dMMV/Op) (SEQ ID NO:858), a plant P450 promoter (MP1/Op) (SEQ ID NO:859), or an elongation factor 1a (EF1A/Op) promoter (SEQ ID NO:860). In some examples, the promoter comprises a polynucleotide sequence having at least about 50%, 60%, 65%, 66%, 67%, 68%, 69%, 70%, 71%, 72%, 73%, 74%, 75%, 76%, 77%, 78%, 79%, 80%, 81%, 82%, 83%, 84%, 85%, 86%, 87%, 88%, 89%, 90%, 91%, 92%, 93%, 94%, 95%, 96%, 97%, 98% or 99% sequence identity to SEQ ID NO:885, 856, 857, 858, 859, or 860, wherein the promoter retains repressible promoter activity. In a specific example, the promoter comprises a polynucleotide sequence having at least 95% sequence identity to SEQ ID NO:885, 856, 857, 858, 859, or 860, wherein the promoter retains repressible promoter activity.

[0101] Any host cell can be used, including for example prokaryotic cells such as bacteria, and eukaryotic cells, including yeast, plant, insect, and mammalian cells. In some examples providing the TetR polypeptide comprises contacting the cell with an expression cassette comprising a promoter functional in the cell operably linked to a polynucleotide that encodes the TetR polypeptide. In some examples the methods are used to activate expression of a polynucleotide of interest. In some examples expression of the polynucleotide of interest is activated in various tissues or cells, restricted to selected tissue or cell type, restricted to specific developmental stage(s), restricted to specific environmental conditions, and/or restricted to specific generation of a plant or progeny thereof. In some examples the polynucleotide of interest is primarily expressed in roots, leaves, stems, flowers, silks, anthers, pollen, meristem, germline, seed, endosperm, embryos, or progeny. In some examples expression of the polynucleotide of interest occurs primarily at specific times, which include but are not limited to seed or plant developmental stages, vegetative growth, reproductive cycle, response to environmental conditions, response to pest or pathogen presence, response to chemical compounds, or any combination thereof. In some examples expression of the polynucleotide of interest is reduced, inhibited, or blocked in various tissues or cells, which may be restricted to selected tissue or cell type, restricted to specific developmental stage(s), restricted to specific environmental conditions, and/or restricted to specific generation of a plant or progeny thereof. In some examples expression of the polynucleotide of interest is primarily inhibited in roots, leaves, stems, flowers, silks, anthers, pollen, meristem, germline, seed, endosperm, embryos, or progeny. In some examples expression of the polynucleotide of interest occurs primarily inhibited at specific times, which include but are not limited to seed or plant developmental stages, vegetative growth, reproductive cycle, response to environmental conditions, response to pest or pathogen presence, response to chemical compounds, or any combination thereof.

[0102] Methods include stringently and/or specifically controlling expression of a polynucleotide of interest. Stringency and/or specificity modulated by selecting the combination of elements used in the switch. These include, but are not limited to the promoter operably linked to the repressor, the repressor, the repressible promoter operably linked to the polynucleotide of interest, and optionally the polynucleotide of interest. Further control is provided by selection, dosage, conditions, and/or timing of the application of the chemical ligand. In some examples the expression of the polynucleotide of interest can be controlled more stringently, controlled in various tissues or cells, restricted to selected tissue or cell type, restricted to specific developmental stage(s), restricted to specific environmental conditions, and/or restricted to specific generation of a plant or progeny thereof. In some examples the repressor is operably linked to a constitutive promoter. In some examples the repressor is operably linked to a non-constitutive promoter, including but not limited to a tissue preferred promoter, an inducible promoter, a repressible promoter, a developmental stage preferred promoter, or a promoter having more than one of these properties. In some examples expression of the polynucleotide of interest is primarily regulated in roots, leaves, stems, flowers, silks, anthers, pollen, meristem, germline, seed, endosperm, embryos, or progeny. These methods provide means to alter the phenotype and/or genotype of a cell, tissue, plant, and/or seed. An altered genotype includes any heritable modification to any sequence in a plant genome. An altered phenotype includes any scenario wherein a cell, tissue, plant, and/or seed exhibits a characteristic or trait that distinguishes it from its unaltered state. Altered phenotypes included but are not limited to a different growth habit, altered flower color, altered relative maturity, altered yield, altered fertility, altered flowering time, altered disease tolerance, altered insect tolerance, altered herbicide tolerance, altered stress tolerance, altered water tolerance, altered drought tolerance, altered seed characteristics, altered morphology, altered agronomic characteristic, altered metabolism, altered gene expression profile, altered ploidy, altered crop quality, altered forage quality, altered silage quality, altered processing characteristics, and the like.

[0103] In some examples, the methods use a gene switch which may comprise additional elements. In some examples, one or more additional elements may provide means by which expression of the polynucleotide of interest can be controlled more stringently, controlled in various tissues or cells, restricted to selected tissue or cell type, restricted to specific developmental stage(s), restricted to specific environmental conditions, and/or restricted to specific generation of a plant or progeny thereof. In some examples those elements include site-specific recombination sites, site-specific recombinases, or combinations thereof.

[0104] In some methods, the gene switch may comprise a polynucleotide encoding a repressor, a promoter linked to a polynucleotide of interest, a sequence flanked by site-specific recombination sites, and a repressible promoter operably linked to a site-specific recombinase that specifically recognizes the site-specific recombination sites and implements a recombination event. In some examples, the recombination event is excision of the sequence flanked by the recombination sites. In some instances, the excision creates an operable linkage between the promoter and the polynucleotide of interest. In some examples, the promoter operably linked to the polynucleotide of interest is a non-constitutive promoter, including but not limited to a tissue preferred promoter, an inducible promoter, a repressible promoter, a developmental stage preferred promoter, or a promoter having more than one of these properties. In some examples expression of the polynucleotide of interest is primarily regulated in roots, leaves, stems, flowers, silks, anthers, pollen, meristem, germline, seed, endosperm, embryos, or progeny.

[0105] In other methods, the gene switch may comprise a polynucleotide encoding a repressor, a repressible promoter linked to a polynucleotide of interest, a sequence flanked by site-specific recombination sites, and a site-specific recombinase that specifically recognizes the site-specific recombination sites and implements a recombination event. In some examples, the recombination event is excision of the sequence flanked by the recombination sites. In some instances, the excision creates an operable linkage between the repressible promoter and the polynucleotide of interest. In some examples, the sequence flanked by recombination sites comprises a recombinase expression cassette. In some examples expression of the polynucleotide of interest is primarily regulated in roots, leaves, stems, flowers, silks, anthers, pollen, meristem, germline, seed, endosperm, embryos, or progeny. In some examples the excision occurs in a parent such that the progeny inherit the post-excision product.

[0106] In some examples, the gene switch may comprise a polynucleotide encoding a repressor, a promoter operably linked to a polynucleotide of interest flanked by site-specific recombination sites, and a repressible promoter operably linked to a site-specific recombinase that specifically recognizes the site-specific recombination sites and implements a recombination event. In some examples, the recombination event is excision of the sequence flanked by the recombination sites. In some examples, the promoter operably linked to the polynucleotide of interest is a non-constitutive promoter, including but not limited to a tissue preferred promoter, an inducible promoter, a repressible promoter, a developmental stage preferred promoter, or a promoter having more than one of these properties. In some examples expression of the polynucleotide of interest is primarily regulated in roots, leaves, stems, flowers, silks, anthers, pollen, meristem, germline, seed, endosperm, embryos, or progeny.

[0107] In another example, the methods comprise providing a gene switch comprising a polynucleotide encoding a repressor, a promoter linked to a polynucleotide of interest, a sequence flanked by site-specific recombination sites, and a repressible promoter operably linked to a site-specific recombinase that specifically recognizes the site-specific recombination sites and implements a recombination event. In some examples, the recombination event is inversion of the sequence flanked by the recombination sites. In some instances, the inversion creates an operable linkage between the promoter and the polynucleotide of interest. In some examples, the promoter operably linked to the polynucleotide of interest is a non-constitutive promoter, including but not limited to a tissue preferred promoter, an inducible promoter, a repressible promoter, a developmental stage preferred promoter, or a promoter having more than one of these properties. In some examples expression of the polynucleotide of interest is primarily regulated in roots, leaves, stems, flowers, silks, anthers, pollen, meristem, germline, seed, endosperm, or embryos. In some examples the inversion occurs in a parent such that the progeny inherit the post-inversion product.

[0108] In other methods, the provided gene switch may comprise a polynucleotide encoding a repressor, a repressible promoter linked to a polynucleotide of interest, a sequence flanked by site-specific recombination sites, and a site-specific recombinase that specifically recognizes the site-specific recombination sites and implements a recombination event. In some examples, the recombination event is inversion of the sequence flanked by recombination sites. In some instances, the inversion creates an operable linkage between the repressible promoter and the polynucleotide of interest. In some cases, the sequence flanked by site-specific recombination sites is the polynucleotide of interest. In some cases, the sequence flanked by site-specific recombination sites is the repressible promoter. In some examples, a recombinase expression cassette is provided, wherein the recombinase is operably linked to a non-constitutive promoter, including but not limited to a tissue preferred promoter, an inducible promoter, a repressible promoter, a developmental stage preferred promoter, or a promoter having more than one of these properties. In some examples expression of the polynucleotide of interest is primarily expressed in roots, leaves, stems, flowers, silks, anthers, pollen, meristem, seed, endosperm, embryos, or progeny. In some examples the inversion occurs in a parent such that the progeny inherit the post-inversion product.

[0109] In other examples, methods for altering a genotype or phenotype are provided. In some examples the methods comprise providing a cell comprising the polynucleotide of interest operably linked to a repressible promoter comprising at least one tetracycline operator sequence; providing a SuR polypeptide and, providing a sulfonylurea compound, thereby altering a genotype and/or phenotype of the cell. Any host cell can be used, including for example prokaryotic cells such as bacteria, and eukaryotic cells, including yeast, plant, insect, and mammalian cells. In some examples providing the SuR polypeptide comprises contacting the cell with an expression cassette comprising a promoter functional in the cell operably linked to a polynucleotide that encodes the SuR polypeptide. In some examples the methods are used to activate expression of a polynucleotide of interest. In some examples expression of the polynucleotide of interest is activated in various tissues or cells, restricted to selected tissue or cell type, restricted to specific developmental stage(s), restricted to specific environmental conditions, and/or restricted to specific generation of a plant or progeny thereof. In some examples the polynucleotide of interest is primarily expressed in roots, leaves, stems, flowers, silks, anthers, pollen, meristem, germline, seed, endosperm, embryos, or progeny. In some examples expression of the polynucleotide of interest occurs primarily at specific times, which include but are not limited to seed or plant developmental stages, vegetative growth, reproductive cycle, response to environmental conditions, response to pest or pathogen presence, response to chemical compounds, or any combination thereof. In some examples expression of the polynucleotide of interest is reduced, inhibited, or blocked in various tissues or cells, which may be restricted to selected tissue or cell type, restricted to specific developmental stage(s), restricted to specific environmental conditions, and/or restricted to specific generation of a plant or progeny thereof. In some examples expression of the polynucleotide of interest is primarily inhibited in roots, leaves, stems, flowers, silks, anthers, pollen, meristem, germline, seed, endosperm, embryos, or progeny. In some examples expression of the polynucleotide of interest occurs primarily inhibited at specific times, which include but are not limited to seed or plant developmental stages, vegetative growth, reproductive cycle, response to environmental conditions, response to pest or pathogen presence, response to chemical compounds, or any combination thereof.

[0110] In another example, methods of altering a genotype or phenotype in a host cell are provided, the methods comprising: providing a cell comprising the polynucleotide of interest operably linked to a repressible promoter comprising at least one tetracycline operator sequence; providing a TetR polypeptide and, providing a tetracycline compound, thereby regulating transcription of the polynucleotide of interest. In some examples, the repressible promoter is a plant actin promoter, a banana streak virus promoter (BSV), an MMV promoter, an enhanced MMV promoter (dMMV), a plant P450 promoter, or an elongation factor 1a (EF1A) promoter. In some examples the promoter is a plant actin promoter (actin/Op) (SEQ ID NO:855), a banana streak virus promoter (BSV/Op) (SEQ ID NO:856), a mirabilis mosaic virus promoter (MMV/Op) (SEQ ID NO:857), an enhanced MMV promoter (dMMV/Op) (SEQ ID NO:858), a plant P450 promoter (MP1/Op) (SEQ ID NO:859), or an elongation factor 1a (EF1A/Op) promoter (SEQ ID NO:860). In some examples, the promoter comprises a polynucleotide sequence having at least about 50%, 60%, 65%, 66%, 67%, 68%, 69%, 70%, 71%, 72%, 73%, 74%, 75%, 76%, 77%, 78%, 79%, 80%, 81%, 82%, 83%, 84%, 85%, 86%, 87%, 88%, 89%, 90%, 91%, 92%, 93%, 94%, 95%, 96%, 97%, 98% or 99% sequence identity to SEQ ID NO:885, 856, 857, 858, 859, or 860, wherein the promoter retains repressible promoter activity. In a specific example, the promoter comprises a polynucleotide sequence having at least 95% sequence identity to SEQ ID NO:885, 856, 857, 858, 859, or 860, wherein the promoter retains repressible promoter activity.

[0111] Any host cell can be used, including for example prokaryotic cells such as bacteria, and eukaryotic cells, including yeast, plant, insect, and mammalian cells. In some examples providing the TetR polypeptide comprises contacting the cell with an expression cassette comprising a promoter functional in the cell operably linked to a polynucleotide that encodes the TetR polypeptide. In some examples the methods are used to activate expression of a polynucleotide of interest. In some examples expression of the polynucleotide of interest is activated in various tissues or cells, restricted to selected tissue or cell type, restricted to specific developmental stage(s), restricted to specific environmental conditions, and/or restricted to specific generation of a plant or progeny thereof. In some examples the polynucleotide of interest is primarily expressed in roots, leaves, stems, flowers, silks, anthers, pollen, meristem, germline, seed, endosperm, embryos, or progeny. In some examples expression of the polynucleotide of interest occurs primarily at specific times, which include but are not limited to seed or plant developmental stages, vegetative growth, reproductive cycle, response to environmental conditions, response to pest or pathogen presence, response to chemical compounds, or any combination thereof. In some examples expression of the polynucleotide of interest is reduced, inhibited, or blocked in various tissues or cells, which may be restricted to selected tissue or cell type, restricted to specific developmental stage(s), restricted to specific environmental conditions, and/or restricted to specific generation of a plant or progeny thereof. In some examples expression of the polynucleotide of interest is primarily inhibited in roots, leaves, stems, flowers, silks, anthers, pollen, meristem, germline, seed, endosperm, embryos, or progeny. In some examples expression of the polynucleotide of interest occurs primarily inhibited at specific times, which include but are not limited to seed or plant developmental stages, vegetative growth, reproductive cycle, response to environmental conditions, response to pest or pathogen presence, response to chemical compounds, or any combination thereof.

[0112] In some examples, the sulfonylurea compound is a pyrimidinylsulfonylurea compound (e.g., amidosulfuron, azimsulfuron, bensulfuron, chlorimuron, cyclosulfamuron, ethoxysulfuron, flazasulfuron, flucetosulfuron, flupyrsulfuron, foramsulfuron, halosulfuron, imazosulfuron, mesosulfuron, nicosulfuron, orthosulfamuron, oxasulfuron, primisulftiron, pyrazosulfuron, rimsulfuron, sulfometuron, sulfosulfuron and trifloxysulfuron); a triazinylsulfonylurea compound (e.g., chlorsulfuron, cinosulfuron, ethametsulfuron, iodosulfuron, metsulfuron, prosulfuron, thifensulfuron, triasulfuron, tribenuron, triflusulfuron and tritosulfuron); or a thiadazolylurea compound (e.g., cloransulam, diclosulam, florasulam, flumetsulam, metosulam, and penoxsulam). For example, the sulfonylurea compound can be a chlorosulfuron, an ethametsulfuron, a thifensulfuron, a metsulfuron, a sulfometuron, a tribenuron, a chlorimuron, a nicosulfuron, or a rimsulfuron.

[0113] In some examples the sulfonylurea compound is an ethametsulfuron. In some examples the ethametsulfuron is provided at a concentration of about 0.001, 0.002, 0.003, 0.004, 0.005, 0.006, 0.007, 0.008, 0.009, 0.01, 0.02, 0.03, 0.04, 0.05, 0.06, 0.07, 0.08, 0.09, 0.10, 0.15, 0.2, 0.25, 0.3, 0.35, 0.4, 0.45, 0.5, 0.55, 0.6, 0.65, 0.7, 0.75, 0.8, 0.85, 0.9, 0.95, 1.0, 1.5, 2.0, 2.5, 3.0, 3.5, 4.0, 4.5, 5.0, 5.5, 6.0, 6.5, 7.0, 7.5, 8.0, 8.5, 9.0, 9.5, 10, 11, 12, 13, 14, 15, 16, 17, 18, 19, 20, 25, 30, 35, 40, 45, 50, 55, 60, 65, 70, 75, 80, 85, 90, 100, 200 or 500 pg/ml. In some examples the SuR polypeptide has a ligand binding domain having at least 50 60%, 65%, 66%, 67%, 68%, 69%, 70%, 71%, 72%, 73%, 74%, 75%, 76%, 77%, 78%, 79%, 80%, 81%, 82%, 83%, 84%, 85%, 86%, 87%, 88%, 89%, 90%, 91%, 92%, 93%, 94%, 95%, 96%, 97%, 98% or 99% sequence identity to a SuR polypeptide of SEQ ID NO:205-419, wherein the sequence identity is determined over the full length of the polypeptide using a global alignment method. In some examples the global alignment method is GAP, wherein the default parameters are for an amino acid sequence % identity and % similarity using a GAP Weight of 8 and a Length Weight of 2, and the BLOSUM62 scoring matrix. In some examples the polypeptide has a ligand binding domain from a SuR polypeptide selected from the group consisting of SEQ ID NO:205-419. In some examples the polypeptide is selected from the group consisting of SEQ ID NO:205-419. In some examples the polypeptide is encoded by a polynucleotide of SEQ ID NO:622-836.

[0114] In some examples the sulfonylurea compound is chlorsulfuron. In some examples the chlorsulfuron is provided at a concentration of about 0.01, 0.02, 0.03, 0.04, 0.05, 0.06, 0.07, 0.08, 0.09, 0.10, 0.15, 0.2, 0.25, 0.3, 0.35, 0.4, 0.45, 0.5, 0.55, 0.6, 0.65, 0.7, 0.75, 0.8, 0.85, 0.9, 0.95, 1.0, 1.5, 2.0, 2.5, 3.0, 3.5, 4.0, 4.5, 5.0, 5.5, 6.0, 6.5, 7.0, 7.5, 8.0, 8.5, 9.0, 9.5, 10, 11, 12, 13, 14, 15, 16, 17, 18, 19, 20, 25, 30, 35, 40, 45, 50, 55, 60, 65, 70, 75, 80, 85, 90, 100, 200 or 500 pg/ml. In some examples the SuR polypeptide has a ligand binding domain having at least 50% 60%, 65%, 66%, 67%, 68%, 69%, 70%, 71%, 72%, 73%, 74%, 75%, 76%, 77%, 78%, 79%, 80%, 81%, 82%, 83%, 84%, 85%, 86%, 87%, 88%, 89%, 90%, 91%, 92%, 93%, 94%, 95%, 96%, 97%, 98% or 99% sequence identity to a SuR polypeptide of SEQ ID NO:14-204, wherein the sequence identity is determined over the full length of the polypeptide using a global alignment method. In some examples the global alignment method is GAP, wherein the default parameters are for an amino acid sequence % identity and % similarity using GAP Weight of 8 and Length Weight of 2 and the BLOSUM62 scoring matrix. In some examples the polypeptide has a ligand binding domain from a SuR polypeptide selected from the group consisting of SEQ ID NO:14-204. In some examples the polypeptide is selected from the group consisting of SEQ ID NO:14-204. In some examples the polypeptide is encoded by a polynucleotide of SEQ ID NO:431-621.

[0115] The ability to tightly regulate gene expression provides means for controlling engineered trait expression and distribution. Such systems may prevent transgene flow into non-transgenic crops or other plants. Chemically-regulated gene switches, gene switch components, and methods of use are provided. Tetracycline repressor was converted to specifically recognize sulfonylurea compounds using protein modeling, DNA shuffling, and screening. For agricultural applications, sulfonylurea compounds are phloem mobile and commercially available, thereby providing a good basis for use as switch ligand chemistry. Following several rounds of modeling and DNA shuffling, repressors that specifically recognize SU chemistry nearly as well as wild type TetR recognizes cognate inducers have been generated. These polypeptides comprise true sulfonylurea repressors (SuRs), which have been validated in planta to demonstrate functionality of the SuR switch system. While exemplified in an agricultural context, these methods and compositions can be used in a wide variety of other settings and organisms.

[0116] In general, a gene switch system wherein the chemical used penetrates rapidly and is perceived by all cell types in the organism, but does not perturb any endogenous regulatory networks will be most useful. Other characteristics include the behavior of the sensor component, for example the stringency of regulation and response in the absence or presence of inducer. In general a switch system having tight regulation of the “off” state in the absence of inducer and rapid and intense response in the presence of inducer is preferred.

[0117] Expression of the Tn10-operon is regulated by binding of the tet repressor to its operator sequences (Beck et al. (1982) J Bacteriol 150:633-642; Wray & Reznikoff (1983) J Bacteriol 156:1188-1191). The high specificity of tetracycline repressor for the tet operator, the high efficiency of induction by tetracycline and its derivatives, the low toxicity of the inducer, as well as the ability of tetracycline to easily permeate most cells, are the basis for the application of the tet system in somatic gene regulation in eukaryotic cells from animals (Wirtz & Clayton (1995) Science 268:1179-1183; Gossen et al. (1995) Science 268:1766-1769), humans (Deuschle et al. (1995) Mol Cell Biol 15:1907-1914; Furth et al. (1994) PNAS 91:9302-9306; Gossen & Bujard (1992) PNAS 89:5547-5551; Gossen et al. (1995) Science 268:1766-1769) and plant cell cultures (Wilde et al. (1992) EMBO J 11:1251-1259; Gatz et al. (1992) Plant J 2:397-404; Roder et al. (1994) Mol Gen Genet 243:32-28; Ulmasov et al. (1997) Plant Mol Biol 35:417-424).

[0118] A number of variations of tetracycline operator/repressor systems have been devised. For example, one system based on conversion of the tet repressor to an activator was developed via fusion of the repressor to a transcriptional transactivation domain such as herpes simplex virus VP16 and the tet repressor (tTA, Gossen & Bujard (1992) PNAS 89:5547-5551). In this system, a minimal promoter is activated in the absence of tetracycline by binding of tTA to tet operator sequences, and tetracycline inactivates the transactivator and inhibits transcription. This system has been used in plants (Weinmann et al. (1994) Plant J 5:559-569), rat hearts (Fishman et al. (1994) J Clin Invest 93:1864-1868) and mice (Furth et al. (1994) PNAS 91:9302-9306). However, there were indications that the chimeric tTA fusion protein was toxic to cells at levels required for efficient gene regulation (Bohl et al. (1996) Nat Med 3:299-305).

[0119] Useful tet operator containing promoters further include those known in the art (see, e.g., Matzke et al. (2003) Plant Mol Biol Rep 21:9-19; Padidam (2003) Curr Op Plant Biol 6:169-177; Gatz & Quail (1988) PNAS 85:1394-1397; Ulmasov et al. (1997) Plant Mol Biol 35:417-424; Weinmann et al. (1994) Plant J 5:559-569). One or more tet operator sequences can be added to a promoter in order to produce a tetracycline inducible promoter. In some examples up to 7 tet operators have been introduced upstream of a minimal promoter sequence and a TetR::VP16 activation domain fusion applied in trans activates expression only in the absence of inducer (Weinmann et al. (1994) Plant J 5:559-569; Love et al. (2000) Plant J 21:579-588). A widely tested tetracycline regulated expression system for plants using the CaMV 35S promoter was developed (Gatz et al. (1992) Plant J 2:397-404) having three tet operators introduced near the TATA box (3XOpT 35S). The 3XOpT 35S promoter generally functioned in tobacco and potato, however toxicity and poor plant phenotype in tomato and Arabidopsis (Gatz (1997) Ann Rev Plant Physiol Plant Mol Biol 48:89-108; Corlett et al. (1996) Plant Cell Environ 19:447-454) were also reported. Another factor is that the tetracycline-related chemistry is rapidly degraded in the light, which tends to confine its use to testing in laboratory conditions.

[0120] One characteristic of a chemically regulated gene switch is its sensitivity to cognate ligand. One way to potentially improve ligand response when using a negatively controlled system as described here is to auto-regulate expression of the repressor. It had been mathematically predicted that negative auto-regulation would not only dampen fluctuations in gene expression but also enhance signal response time in regulatory circuits involving repressor molecules (Savageau (1974) Nature 252:542-549). This principle was demonstrated in E. coli using synthetic gene circuitry (Rosenfeld et al. (2002) J Mol Biol 323:785-793). Most recently Nevozhay et al. extended this finding to a lower eukaryote (yeast) by comparing synthetic gene networks built with and without an auto-regulated tetracycline repressor and fluorescent protein reporter system (Nevozhay (2009) Proc Natl Acad Sci USA 106:5123-5128).

[0121] The modular architecture of repressor proteins and the commonality of helix-turn-helix DNA binding domains allows for the creation of SuR polypeptides having altered DNA binding specificity. For example, the DNA binding specificity can be altered by fusing a SuR ligand binding domain to an alternate DNA binding domain. For example, the DNA binding domain from TetR class D can be fused to a SuR ligand binding domain to create SuR polypeptides that specifically bind to polynucleotides comprising a class D tetracycline operator. In some examples a DNA binding domain variant or derivative can be used. For example, a DNA binding domain from a TetR variant that specifically recognizes a tetO-4C operator or a tetO-6C operator could be used (Helbl & Hillen (1998) J Mol Biol 276:313-318; Helbl et al. (1998) J Mol Biol 276:319-324. The four helix bundle formed by helices α8 and α10 in both subunits can be substituted to ensure dimerization specificity when targeting two different operator specific repressor variants in the same cell to prevent heterodimerization (e.g., Rossi et al. (1998) Nat Genet 20:389-393; Berens & Hillen (2003) Eur J Biochem 270:3109-3121). In another example, the DNA binding domain from LexA repressor was fused to GAL4 wherein this hybrid protein recognized LexA operators in both E. coli and yeast (Brent & Ptashne (1985) Cell 43:729-736). In another example, all of the presumptive DNA binding or DNA-recognition R-groups of the 434 repressor were replaced by the corresponding positions of the P22 repressor. Operator binding specificity of the hybrid repressor 434R[α3(P22R)] was tested both in vivo and in vitro and each test showed that this targeted modification of 434 shifted the DNA binding specificity from 434 operator to P22 operator (Wharton & Ptashne (1985) Nature 316:601-605). This work was further extended by creating a heterodimer of wild type 434R and 434R[α3(P22R)] which then specifically recognized a chimeric P22/434 operator sequence (Hollis et al. (1988) PNAS 85:5834-5838). In another example, the N-terminal half of the AraC protein was fused to the LexA repressor DNA binding domain. The resulting AraC:LexA chimera dimerized, bound LexA operator, and repressed expression of a LexA operator:β-galactosidase fusion gene in an arabinose-responsive manner (Bustos & Schleif (1993) PNAS 90:5638-5642).

[0122] For convenience and high throughput it will often be desirable to screen/select for desired modified nucleic acids in a microorganism, such as in a bacteria such as E. coli, or unicellular eukaryote such as yeast including S. cerevisiae, S. pombe, P. pastoris or protists such as Chlamydomonas, or in model cell systems such as SF9, Hela, CHO, BMS, BY2, or other cell culture systems. In some instances, screening in plant cells or plants may be desirable, including plant cell or explant culture systems or model plant systems such as Arabidopsis, or tobacco. In some examples throughput is increased by screening pools of host cells expressing different modified nucleic acids, either alone or as part of a gene fusion construct. Any pools showing significant activity can be deconvoluted to identify single clones expressing the desirable activity.

[0123] Recombinant constructs comprising one or more of nucleic acid sequences such as a gene switch, a plant promoter comprising at least one tet operator, a polynucleotide encoding a SuR polypeptide, and/or a polynucleotide of interest are provided. The constructs comprise a vector, such as, a plasmid, a cosmid, a phage, a virus, a bacterial artificial chromosome (BAC), a yeast artificial chromosome (YAC), or the like, into which a polynucleotide has been inserted. In some examples, the construct further comprises regulatory sequences, including, for example, a promoter, operably linked to the sequence. Suitable vectors are well known and include chromosomal, non-chromosomal and synthetic DNA sequences, such as derivatives of SV40; bacterial plasmids; replicons; phage DNA; baculovirus; yeast plasmids; vectors derived from combinations of plasmids and phage DNA, viral DNA such as vaccinia, adenovirus, fowl pox virus, pseudorabies, adenovirus, adeno-associated viruses, retroviruses, geminiviruses, TMV, PVX, other plant viruses, Ti plasmids, Ri plasmids and many others.

[0124] The vectors may optionally contain one or more selectable marker genes to provide a phenotypic trait for selection of transformed host cells. Usually, the selectable marker gene will encode antibiotic or herbicide resistance. Suitable genes include those coding for resistance to the antibiotic spectinomycin or streptomycin (e.g., the aadA gene), the streptomycin phosphotransferase (SPT) gene for streptomycin resistance, the neomycin phosphotransferase (NPTII or NPTIII) gene kanamycin or geneticin resistance, the hygromycin phosphotransferase (HPT) gene for hygromycin resistance. Additional selectable marker genes include dihydrofolate reductase or neomycin resistance for eukaryotic cell culture and tetracycline or ampicillin resistance. Genes coding for resistance to herbicides include those which act to inhibit the action of glutamine synthase, such as phosphinothricin or basta (e.g., the bar gene), EPSPS, GOX, or GAT which provide resistance to glyphosate, mutant ALS (acetolactate synthase) which provides resistance to sulfonylurea type herbicides or any other known genes.

[0125] In bacterial systems a number of expression vectors are available. Such vectors include, but are not limited to, multifunctional E. coli cloning and expression vectors such as BLUESCRIPT (Stratagene); pIN vectors (Van Heeke & Schuster (1989) J Biol Chem 264:5503-5509); pET vectors (Novagen, Madison Wis.) and the like. Similarly, in S. cerevisiae a number of vectors containing constitutive or inducible promoters such as alpha factor, alcohol oxidase and PGH may be used for production of polypeptides. For reviews, see, Ausubel & Grant et al. (1987) Meth Enzymol 153:516-544. A variety of expression systems can be used in mammalian host cells, including viral-based systems, such as adenovirus and rous sarcoma virus (RSV) systems. Any number of commercially or publicly available expression systems or derivatives thereof can be used.

[0126] In plant cells expression can be driven from an expression cassette integrated into a plant chromosome, or an organelle, or cytoplasmically from an episomal or viral nucleic acid. Numerous plant derived regulatory sequences have been described, including sequences which direct expression in a tissue specific manner, e.g., TobRB7, patatin B33, GRP gene promoters, the rbcS-3A promoter and the like. Alternatively, high level expression can be achieved by transiently expressing exogenous sequences of a plant viral vector, e.g., TMV, BMV, geminiviruses including WDV and the like.

[0127] Typical vectors useful for expression of nucleic acids in higher plants are known including vectors derived from the tumor-inducing (Ti) plasmid of Agrobacterium tumefaciens described by Rogers et al. (1987) Meth Enzymol 153:253-277. Exemplary A. tumefaciens vectors include plasmids pKYLX6 and pKYLX7 of Schardl et al. (1987) Gene 61:1-11, and Berger et al. (1989) PNAS 86:8402-8406 and plasmid pB101.2 (e.g., available from Clontech Laboratories, Palo Alto, Calif.). A variety of known plant viruses can be employed as vectors including cauliflower mosaic virus (CaMV), geminiviruses, brome mosaic virus and tobacco mosaic virus.

[0128] The gene switch, a promoter, a TetOp repressible plant promoter, a recombinase, and/or the SuR may be used to control expression of a polynucleotide of interest. The polynucleotide of interest may be any sequence of interest, including but not limited to transcription regulatory elements, translation regulatory elements, centromere elements, telomere elements, sequences encoding a polypeptide, encoding an mRNA, encoding a tRNA, encoding an rRNA, encoding a sequence that directs gene silencing, a ribozyme, a fusion protein, a replicating vector, a screenable marker, and the like. Expression of the polynucleotide of interest may be used to induce expression of an encoding RNA and/or polypeptide, or conversely to suppress expression of an encoded RNA, RNA target sequence, and/or polypeptide. In specific examples the polynucleotide of interest comprises a sequence that directs gene silencing, including but not limited to encoding an RNAi precursor, encoding an active RNAi agent, a miRNA, an antisense polynucleotide, a ribozyme, or any other silencing molecule and combinations thereof. In specific examples, the polynucleotide sequence may comprise a polynucleotide encoding a plant hormone, plant defense protein, a nutrient transport protein, a biotic association protein, a desirable input trait, a desirable output trait, a stress resistance gene, a herbicide resistance gene, a disease/pathogen resistance gene, a male sterility, a developmental gene, a regulatory gene, a DNA repair gene, a transcriptional regulatory gene, a biosynthetic polypeptide, or any other polynucleotide and/or polypeptide of interest and combinations thereof. A biosynthetic polypeptide is any polypeptide involved in any biological, cellular, metabolic, synthetic, and/or catabolic pathway in a cell. In some examples, the polynucleotide of interest encodes a polypeptide that specifically binds to a target nucleic acid sequence, examples of which include but are not limited to polynucleotides encoding recombinases, integrases, excisionases, transposases, repressors, reverse repressors, activators, nucleases, endonucleases, exonucleases, homing endonucleases, zinc-finger proteins, zinc-finger nucleases, transcription factors, polymerases, ligases, and the like. In some examples, a polypeptide that specifically binds to a target nucleic acid sequence cuts at least one strand of the target nucleic acid at or near a specific sequence defined by sequence composition and/or proximity to a specific sequence composition (e.g., a type IIS restriction nuclease, such as Fokl). For example, a polynucleotide of interest can encode a polypeptide that cuts a DNA nucleic acid molecule at a specific sequence. In some examples, the polynucleotide of interest encodes a polynucleotide that specifically binds to a target nucleic acid sequence, examples of which include but are not limited to an antisense polynucleotide, a miRNA precursor, a miRNA, and the like.

[0129] Specific binding refers to binding, duplexing, or hybridization of a molecule to a specific target molecule at a level that is significantly higher than binding to a non-target molecule. Generally, specific binding is a level at least 2-fold higher than non-specific background binding. Specific binding includes binding of a chemical molecule, polypeptide, or polynucleotide to any of a target chemical, target polypeptide, or target polynucleotide.

[0130] Any promoter(s) can be used in the compositions and methods. For example, a polynucleotide encoding a SuR polypeptide, a recombinase, a polynucleotide of interest, or any other sequence can be operably linked to a constitutive, a tissue-preferred, an inducible, a developmentally, a temporally and/or a spatially regulated or other promoters including those from plant viruses or other pathogens which function in a plant cell. A variety of promoters useful in plants is reviewed in Potenza et al. (2004) In Vitro Cell Dev Biol Plant 40:1-22. Exemplary promoters include but are not limited to a 35S CaMV promoter (Odell et al. (1995) Nature 313:810-812), a S-adenosylmethionine synthase promoter (SAMS) (e.g., those disclosed in U.S. Pat. No. 7,217,858 and US2008/0026466), a Mirabilis mosaic virus promoter (e.g., Dey & Maiti (1999) Plant Mol Biol 40:771-782; Dey & Maiti (1999) Transgenics 3:61-70), an elongation factor promoter (e.g., US2008/0313776 and US2009/0133159), a banana streak virus promoter, an actin promoter (e.g., McElroy et al. (1990) Plant Cell 2:163-171), a TobRB7 promoter (e.g., Yamamoto et al. (1991) Plant Cell 3:371), a patatin promoter (e.g., patatin B33, Martin et al. (1997) Plant J 11:53-62), a ribulose 1,5-bisphosphate carboxylase promoter (e.g., rbcS-3A, see, for example Fluhr et al. (1986) Science 232:1106-1112, and Pellingrinischi et al. (1995) Biochem Soc Trans 23:247-250), an ubiquitin promoter (e.g., Christensen et al. (1992) Plant Mol Biol 18:675-689, and Christensen & Quail (1996) Transgen Res 5:213-218), a metallothionin promoter (e.g., US2010/0064390), a Rab17 promoter (e.g., Vilardell et al. (1994) Plant Mol Biol 24:561-569), a conglycinin promoter (e.g., Chamberland et al. (1992) Plant Mol Biol 19:937-949), a plasma membrane intrinsic (PIP) promoter (e.g., Alexandersson et al. (2009) Plant J 61:650-660), a lipid transfer protein (LTP) promoter (e.g., US2009/0158464, US2009/0070893, and US2008/0295201), a gamma zein promoter (e.g., Uead et al. (1994) Mol Cell Biol 14:4350-4359), a gamma kafarin promoter (e.g., Mishra et al. (2008) Mol Biol Rep 35:81-88), a globulin promoter (e.g., Liu et al. (1998) Plant Cell Rep 17:650-655), a legumin promoter (e.g., U.S. Pat. No. 7,211,712), an early endosperm promoter (EEP) (e.g., US2007/0169226 and US2009/0227013), a B22E promoter (e.g., Klemsdal et al. (1991) Mol Gen Genet 228:9-16), an oleosin promoter (e.g., Plant et al. (1994) Plant Mol Biol 25:193-205), an early abundant protein (EAP) promoter (e.g., U.S. Pat. No. 7,321,031), a late embryogenesis abundant (LEA) protein (e.g., Hva1, Straub et al. (1994) Plant Mol Biol 26:617-630; Dhn and WSI18, Xiao & Xue (2001) Plant Cell Rep 20:667-673), In2-2 promoter (De Veylder et al. (1997) Plant Cell Physiol 38:568-577), a glutathione S-transferase (GST) promoter (e.g., WO93/01294), a PR promoter (e.g., Cao et al. (2006) Plant Cell Rep 6:554-560, and Ono et al. (2004) Biosci Biotech Biochem 68:803-807), an ACE1 promoter (e.g., Mett et al. (1993) Proc Natl Acad Sci USA 90:4567-4571), a steroid responsive promoter (e.g., Schena et al. (1991) Proc Natl Acad Sci USA 88:10421-10425, and McNellis et al. (1998) Plant J 14:247-257), an ethanol-inducible promoter (e.g., AlcA, Caddick et al. (1988) Nat Biotechnol 16:177-180), an estradiol-inducible promoter (e.g., Bruce et al. (2000) Plant Cell 12:65-79), an XVE estradiol-inducible promoter (e.g., Zao et al. (2000) Plant J 24: 265-273), a VGE methoxyfenozide-inducible promoter (e.g., Padidam et al. (2003) Transgen Res 12:101-109), or a TGV dexamethasone-inducible promoter (e.g., Bohner et al. (1999) Plant J 19:87-95).

[0131] Any polynucleotide, including isolated or recombinant polynucleotides of interest, polynucleotides encoding SuRs, recombinase sites, polynucleotides encoding a recombinase, regulatory regions, introns, promoters, and promoters comprising TetOp sequences may be obtained and their nucleotide sequence determined, by any standard method. The polynucleotides may be chemically synthesized in their full-length or assembled from chemically synthesized oligonucleotides (Kutmeier et al. (1994) BioTechniques 17:242). Assembly from oligonucleotides typically involves synthesis of overlapping oligonucleotides, annealing and ligating of those oligonucleotides and PCR amplification of the ligated product. Alternatively, a polynucleotide may be isolated or generated from a suitable source including suitable source a cDNA library generated from tissue or cells, a genomic library, or directly isolated from a host by PCR amplification using specific primers to the 3′ and 5′ ends of the sequence or by cloning using an nucleotide probe specific for the polynucleotide of interest. Amplified nucleic acid molecules generated by PCR may then be cloned into replicable cloning vectors using standard methods. The polynucleotide may be further manipulated using any standard methods including recombinant DNA techniques, vector construction, mutagenesis and PCR (see, e.g., Sambrook et al. (1990) Molecular Cloning, A Laboratory Manual, 2d Ed., Cold Spring Harbor Laboratory, Cold Spring Harbor, N.Y.; Ausubel et al., Eds. (1998) Current Protocols in Molecular Biology, John Wiley and Sons, NY).

[0132] A polynucleotide, polypeptide or other component is “isolated” when it is partially or completely separated from components with which it is normally associated (other proteins, nucleic acids, cells, synthetic reagents, etc.). A nucleic acid or polypeptide is “recombinant” when it is artificial or engineered, or derived from an artificial or engineered protein or nucleic acid. For example, a polynucleotide that is inserted into a vector or any other heterologous location, e.g, in a genome of a recombinant organism, such that it is not associated with nucleotide sequences that normally flank the polynucleotide as it is found in nature is a recombinant polynucleotide. A protein expressed in vitro or in vivo from a recombinant polynucleotide is an example of a recombinant polypeptide. Likewise, a polynucleotide sequence that does not appear in nature, for example a variant of a naturally occurring gene, is recombinant. For example, the present invention encompasses recombinant polynucleotides comprising repressible promoters comprising at least one operator sequence or repressible promoters operably linked to a polynucleotide encoding a sulfonylurea-responsive repressor.

[0133] In some examples, a recombinant polynucleotide may comprise a repressible promoter operably linked to a polynucleotide encoding a sulfonylurea-responsive repressor, where the repressible promoter comprises a tet operator. In some examples. the encoded sulfonylurea-responsive repressor comprises an amino acid sequence of any one of SEQ ID NO:3-419, or an amino acid sequence having at least 85% (e.g., at least 85%, 90%, 95%, 97%, 99%, 100%) sequence identity to any one of SEQ ID NO:3-419. The repressible promoter can comprise an actin promoter, an MMV promoter, a dMMV promoter, an MP1 promoter, or a BSV promoter operably linked to at least one operator sequence. In some examples, the repressible promoter comprises a polynucleotide sequence as set forth in SEQ ID NO:855, 856, 857, 858, 859, 860 or 862 or, as described herein, a polynucleotide sequence having at least 95% sequence identity to SEQ ID NO:855, 856, 857, 858, 859, 860 or 862.

[0134] Any method for introducing a sequence into a cell or organism can be used, as long as the polynucleotide or polypeptide gains access to the interior of at least one cell. Methods for introducing sequences into plants are known and include, but are not limited to, stable transformation, transient transformation, virus-mediated methods, and sexual breeding. Stably incorporated indicates that the introduced polynucleotide is integrated into a genome and is capable of being inherited by progeny. Transient transformation indicates that an introduced sequence does not integrate into a genome such that it is heritable by progeny from the host. Any means can be used to bring together any gene switch element or combinations thereof, for example a SuR and a polynucleotide of interest operably linked to a promoter comprising a TetOp, including, e.g., stable transformation, transient delivery, cell fusion, sexual crossing or any combination thereof.

[0135] Transformation protocols as well as protocols for introducing polypeptides or polynucleotide sequences into plants may vary depending on the type of plant or plant cell targeted for transformation. Suitable methods of introducing polypeptides and polynucleotides into plant cells include microinjection (Crossway et al. (1986) Biotechniques 4:320-334 and U.S. Pat. No. 6,300,543), electroporation (Riggs et al. (1986) PNAS 83:5602-5606, Agrobacterium-mediated transformation (U.S. Pat. Nos. 5,563,055 & 5,981,840), direct gene transfer (Paszkowski et al. (1984) EMBO J 3:2717-2722), ballistic particle acceleration (U.S. Pat. Nos. 4,945,050, 5,879,918, 5,886,244 & 5,932,782; Tomes et al. (1995) in Plant Cell, Tissue and Organ Culture: Fundamental Methods, ed. Gamborg and Phillips (Springer-Verlag, Berlin); McCabe et al. (1988) Biotechnology 6:923-926). Also see, Weissinger et al. (1988) Ann Rev Genet 22:421-477; Sanford et al. (1987) Particulate Science and Technology 5:27-37; Christou et al. (1988) Plant Physiol 87:671-674; Finer & McMullen (1991) In Vitro Cell Dev Biol 27P:175-182 (soybean); Singh et al. (1998) Theor Appl Genet 96:319-324; Datta et al. (1990) Biotechnology 8:736-740; Klein et al. (1988) PNAS 85:4305-4309; Klein et al. (1988) Biotechnology 6:559-563; U.S. Pat. Nos. 5,240,855, 5,322,783 & 5,324,646; Klein et al. (1988) Plant Physiol 91:440-444; Fromm et al. (1990) Biotechnology 8:833-839; Hooykaas-Van Slogteren et al. (1984) Nature 311:763-764; U.S. Pat. No. 5,736,369; Bytebier et al. (1987) PNAS 84:5345-5349; De Wet et al. (1985) in The Experimental Manipulation of Ovule Tissues, ed. Chapman et al. (Longman, New York), pp. 197-209; Kaeppler et al. (1990) Plant Cell Rep 9:415-418; Kaeppler et al. (1992) Theor Appl Genet 84:560-566; D'Halluin et al. (1992) Plant Cell 4:1495-1505; Li et al. (1993) Plant Cell Rep 12:250-255; Christou & Ford (1995) Ann Bot 75:407-413 and Osjoda et al. (1996) Nat Biotechnol 14:745-750. Alternatively, polynucleotides may be introduced into plants by contacting plants with a virus, or viral nucleic acids. Methods for introducing polynucleotides into plants via viral DNA or RNA molecules are known, see, e.g., U.S. Pat. Nos. 5,889,191, 5,889,190, 5,866,785, 5,589,367, 5,316,931; and Porta et al. (1996) Mol Biotech 5:209-221.

[0136] The term plant includes plant cells, plant protoplasts, plant cell tissue cultures, plant cells or plant tissue cultures from which a plant can be regenerated, plant calli, plant clumps and plant cells that are intact in plants or parts of plants such as embryos, pollen, ovules, seeds, endosperm, meristem, leaves, flowers, branches, fruit, kernels, ears, cobs, husks, stalks, roots, root tips, anthers and the like. Progeny, variants and mutants of the regenerated plants are also included.

[0137] In some examples, a SuR may be introduced into a plastid, either by transformation of the plastid or by directing a SuR transcript or polypeptide into the plastid. Any method of transformation, nuclear or plastid, can be used, depending on the desired product and/or use. Plastid transformation provides advantages including high transgene expression, control of transgene expression, ability to express polycistronic messages, site-specific integration via homologous recombination, absence of transgene silencing and position effects, control of transgene transmission via uniparental plastid gene inheritance and sequestration of expressed polypeptides in the organelle which can obviate possible adverse impacts on cytoplasmic components (e.g., see, reviews including Heifetz (2000) Biochimie 82:655-666; Daniell et al. (2002) Trends Plant Sci 7:84-91; Maliga (2002) Curr Op Plant Biol 5:164-172; Maliga (2004) Ann Rev Plant Biol 55-289-313; Daniell et al. (2005) Trends Biotechnol 23:238-245; and, Verma & Daniell (2007) Plant Physiol 145:1129-1143).

[0138] Methods and compositions of plastid transformation are well known, for example, transformation methods include (Boynton et al. (1988) Science 240:1534-1538; Svab et al. (1990) PNAS 87:8526-8530; Svab et al. (1990) Plant Mol Biol 14:197-205; Svab et al. (1993) PNAS 90:913-917; Golds et al. (1993) Bio/Technology 11:95-97; O'Neill et al. (1993) Plant J 3:729-738; Koop et al. (1996) Planta 199:193-201; Kofer et al. (1998) In Vitro Plant 34:303-309; Knoblauch et al. (1999) Nat Biotechnol 17:906-909); as well as plastid transformation vectors, elements, and selection (Newman et al. (1990) Genetics 126:875-888; Goldschmidt-Clermont, (1991) Nucl Acids Res 19:4083-4089; Carrer et al. (1993) Mol Gen Genet 241:49-56; Svab et al. (1993) PNAS 90:913-917; Verma & Daniell (2007) Plant Physiol 145:1129-1143).

[0139] Methods and compositions for controlling gene expression in plastids are well known including (McBride et al. (1994) PNAS 91:7301-7305; Lössl et al. (2005) Plant Cell Physiol 46:1462-1471; Heifetz (2000) Biochemie 82:655-666; Surzycki et al. (2007) PNAS 104:17548-17553; U.S. Pat. Nos. 5,576,198 and 5,925,806; WO 2005/0544478), as well as methods and compositions to import polynucleotides and/or polypeptides into a plastid, including translational fusion to a transit peptide (e.g., Comai et al. (1988) J Biol Chem 263:15104-15109).

[0140] The SuR polynucleotides and polypeptides provide a means for regulating plastid gene expression via a chemical inducer that readily enters the cell. For example, using the T7 expression system for chloroplasts (McBride et al. (1994) PNAS 91:7301-7305) the SuR could be used to control nuclear T7 polymerase expression. Alternatively, a SuR-regulated promoter could be integrated into the plastid genome and operably linked to the polynucleotide(s) of interest and the SuR expressed and imported from the nuclear genome, or integrated into the plastid. In all cases, application of a sulfonylurea compound is used to efficiently regulate the polynucleotide(s) of interest. A sulfonylurea compound can be applied according to any appropriate method known in the art. For example, a sulfonylurea compound can be applied by foliar application, root drench application, pre-emergence application, post-emergence application, or seed treatment application.

[0141] The repressible promoters provide a means for regulating plastid gene expression via a chemical inducer that readily enters the cell. A TetR or SuR-regulated promoter, including but not limited to SEQ ID NO:855-860 or, as described herein, a promoter having at least 95% sequence identity to SEQ ID NO:855-860, could be integrated into the plastid genome and operably linked to the polynucleotide(s) of interest and the repressor expressed and imported from the nuclear genome, or integrated into the plastid. In all cases, application of a tetracycline compound or a sulfonylurea compound is used to efficiently regulate the polynucleotide(s) of interest.

[0142] Any type of cell and/or organism, prokaryotic or eukaryotic, can be used with the gene switch components, gene switch compositions and/or the methods. For example, any bacterial cell system can be transformed with the compositions. For example, methods of E. coli, Agrobacterium and other bacterial cell transformation, plasmid preparation and the use of phages are detailed, for example, in Current Protocols in Molecular Biology (Ausubel, et al., (eds.) (1994) a joint venture between Greene Publishing Associates, Inc. and John Wiley & Sons, Inc.).

[0143] The gene switch components, gene switch compositions and/or systems can be used with any eukaryotic cell line, including yeasts, protists, algae, insect cells, avian cells or mammalian cells. For example, many commercially and/or publicly available strains of S. cerevisiae are available, as are the plasmids used to transform these cells. For example, strains are available from the American Type Culture Collection (ATCC, Manassas, Va.) and include the Yeast Genetic Stock Center inventory, which moved to the ATCC in 1998. Other yeast lines, such as S. pombe and P. pastoris, and the like are also available. For example, methods of yeast transformation, plasmid preparation, and the like are detailed, for example, in Current Protocols in Molecular Biology (Ausubel et al. (eds.) (1994) a joint venture between Greene Publishing Associates, Inc. and John Wiley & Sons, Inc., see Unit 13 in particular). Transformation methods for yeast include spheroplast transformation, electroporation, and lithium acetate methods. A versatile, high efficiency transformation method for yeast is described by Gietz & Woods ((2002) Methods Enzymol 350:87-96) using lithium acetate, PEG 3500 and carrier DNA.

[0144] The gene switch components, and/or gene switch compositions can be used in mammalian cells, such as CHO, HeLa, BALB/c, fibroblasts, mouse embryonic stem cells and the like. Many commercially available competent cell lines and plasmids are well known and readily available, for example from the ATCC (Manassas, Va.). Isolated polynucleotides for transformation and transformation of mammalian cells can be done by any method known in the art. For example, methods of mammalian and other eukaryotic cell transformation, plasmid preparation, and the use of viruses are detailed, for example, in Current Protocols in Molecular Biology (Ausubel et al. (eds.) (1994) a joint venture between Greene Publishing Associates, Inc. and John Wiley & Sons, Inc., see, Unit 9 in particular). For example, many methods are available, such as calcium phosphate transfection, electroporation, DEAE-dextran transfection, liposome-mediated transfection, microinjection, as well as viral techniques.

[0145] Any plant species can be used with the gene switch components, gene switch compositions, and/or methods, including, but not limited to, monocots and dicots. Examples of plants include, but are not limited to, corn (Zea mays), Brassica spp. (e.g., B. napus, B. rapa, B. juncea), castor, palm, alfalfa (Medicago sativa), rice (Oryza sativa), rye (Secale cereale), sorghum (Sorghum bicolor, Sorghum vulgare), millet (e.g., pearl millet (Pennisetum glaucum), proso millet (Panicum miliaceum), foxtail millet (Setaria italica), finger millet (Eleusine coracana)), sunflower (Helianthus annuus), safflower (Carthamus tinctorius), wheat (Triticum aestivum), soybean (Glycine max), tobacco (Nicotiana tabacum), potato (Solanum tuberosum), peanuts (Arachis hypogaea), cotton (Gossypium barbadense, Gossypium hirsutum), sweet potato (Ipomoea batatus), cassava (Manihot esculenta), coffee (Coffea spp.), coconut (Cocos nucifera), pineapple (Ananas comosus), citrus trees (Citrus spp.), cocoa (Theobroma cacao), tea (Camellia sinensis), banana (Musa spp.), avocado (Persea americana), fig (Ficus casica), guava (Psidium guajava), mango (Mangifera indica), olive (Olea europaea), papaya (Carica papaya), cashew (Anacardium occidentale), macadamia (Macadamia integrifolia), almond (Prunus amygdalus), sugar beets (Beta vulgaris), sugarcane (Saccharum spp.), Arabidopsis thaliana, oats (Avena spp.), barley (Hordeum spp.), leguminous plants such as guar beans, locust bean, fenugreek, garden beans, cowpea, mungbean, fava bean, lentils, and chickpea, vegetables, ornamentals, grasses and conifers. Vegetables include tomatoes (Lycopersicon esculentum), lettuce (e.g., Lactuca sativa), green beans (Phaseolus vulgaris), lima beans (Phaseolus limensis), peas (Pisium spp., Lathyrus spp.), and Cucumis species such as cucumber (C. sativus), cantaloupe (C. cantalupensis), and musk melon (C. melo). Ornamentals include azalea (Rhododendron spp.), hydrangea (Macrophylla hydrangea), hibiscus (Hibiscus rosasanensis), roses (Rosa spp.), tulips (Tulipa spp.), daffodils (Narcissus spp.), petunias (Petunia hybrida), carnation (Dianthus caryophyllus), poinsettia (Euphorbia pulcherrima), and chrysanthemum. Conifers include pines, for example, loblolly pine (Pinus taeda), slash pine (Pinus elliotii), ponderosa pine (Pinus ponderosa), lodgepole pine (Pinus contorta), and Monterey pine (Pinus radiata), Douglas fir (Pseudotsuga menziesii); Western hemlock (Tsuga canadensis), Sitka spruce (Picea glauca), redwood (Sequoia sempervirens), true firs such as silver fir (Abies amabilis) and balsam fir (Abies balsamea) and cedars such as Western red cedar (Thuja plicata) and Alaska yellow cedar (Chamaecyparis nootkatensis).

[0146] The plant cells and/or tissue that have been transformed may be grown into plants using conventional methods (see, e.g., McCormick et al. (1986) Plant Cell Rep 5:81-84). These plants may then be grown and self-pollinated, backcrossed, and/or outcrossed, and the resulting progeny having the desired characteristic identified. Two or more generations may be grown to ensure that the characteristic is stably maintained and inherited and then seeds harvested. In this manner transformed seed having a gene switch component, a repressor, a repressible promoter, a gene switch system, a polynucleotide of interest, a recombinase, a recombination event end-product, and/or a polynucleotide encoding a SuR stably incorporated into their genome are provided. A plant and/or a seed having stably incorporated the DNA construct can be further characterized for expression, agronomics and copy number.

[0147] Sequence identity may be used to compare the primary structure of two polynucleotides or polypeptide sequences, describe the primary structure of a first sequence relative to a second sequence, and/or describe sequence relationships such as variants and homologues. Sequence identity measures the residues in the two sequences that are the same when aligned for maximum correspondence. Sequence relationships can be analyzed using computer-implemented algorithms. The sequence relationship between two or more polynucleotides or two or more polypeptides can be determined by computing the best alignment of the sequences and scoring the matches and the gaps in the alignment, which yields the percent sequence identity and the percent sequence similarity. Polynucleotide relationships can also be described based on a comparison of the polypeptides each encodes. Many programs and algorithms for comparison and analysis of sequences are known. Unless otherwise stated, sequence identity/similarity values provided herein refer to the value obtained using GAP Version 10 (GCG, Accelrys, San Diego, Calif.) using the following parameters: % identity and % similarity for a nucleotide sequence using GAP Weight of 50 and Length Weight of 3, and the nwsgapdna.cmp scoring matrix; % identity and % similarity for an amino acid sequence using GAP Weight of 8 and Length Weight of 2, and the BLOSUM62 scoring matrix (Henikoff & Henikoff (1992) PNAS 89:10915-10919). GAP uses the algorithm of Needleman & Wunsch (1970) J Mol Biol 48:443-453, to find the alignment of two complete sequences that maximizes the number of matches and minimizes the number of gaps.

[0148] Alternatively, polynucleotides and/or polypeptides can be evaluated using other sequence tools. For example, polynucleotides and/or polypeptides can be evaluated using a BLAST alignment tool. A local alignment gaps consists simply of a pair of sequence segments, one from each of the sequences being compared. A modification of Smith-Waterman or Sellers algorithms will find all segment pairs whose scores cannot be improved by extension or trimming, called high-scoring segment pairs (HSPs). The results of the BLAST alignments include statistical measures to indicate the likelihood that the BLAST score can be expected from chance alone. The raw score, S, is calculated from the number of gaps and substitutions associated with each aligned sequence wherein higher similarity scores indicate a more significant alignment. Substitution scores are given by a look-up table (see PAM, BLOSUM). Gap scores are typically calculated as the sum of G, the gap opening penalty and L, the gap extension penalty. For a gap of length n, the gap cost would be G+Ln. The choice of gap costs, G and L is empirical, but it is customary to choose a high value for G (10-15) and a low value for L (1-2). The bit score, S′, is derived from the raw alignment score S in which the statistical properties of the scoring system used have been taken into account. Bit scores are normalized with respect to the scoring system, therefore they can be used to compare alignment scores from different searches. The E-Value, or expected value, describes the likelihood that a sequence with a similar score will occur in the database by chance. It is a prediction of the number of different alignments with scores equivalent to or better than S that are expected to occur in a database search by chance. The smaller the E-Value, the more significant the alignment. For example, an alignment having an E value of e⁻¹¹⁷ means that a sequence with a similar score is very unlikely to occur simply by chance. Additionally, the expected score for aligning a random pair of amino acid is required to be negative, otherwise long alignments would tend to have high score independently of whether the segments aligned were related. Additionally, the BLAST algorithm uses an appropriate substitution matrix, nucleotide or amino acid and for gapped alignments uses gap creation and extension penalties. For example, BLAST alignment and comparison of polypeptide sequences are typically done using the BLOSUM62 matrix, a gap existence penalty of 11 and a gap extension penalty of 1. Unless otherwise stated, scores reported from BLAST analyses were done using the BLOSUM62 matrix, a gap existence penalty of 11 and a gap extension penalty of 1.

[0149] UniProt protein sequence database is a repository for functional and structural protein data and provides a stable, comprehensive, fully classified, richly and accurately annotated protein sequence knowledgebase, with extensive cross-references and querying interfaces freely accessible to the scientific community. The UniProt site has a tool, UniRef, which provides a cluster of proteins have 50%, 90% or 100% sequence identity to a protein sequence of interest from the database. For example, using TetR(B) (UniProt reference P04483) gives a cluster of 18 proteins having 90% sequence identity to P04483.

[0150] The properties, domains, motifs and function of tetracycline repressors are well known, as are standard techniques and assays to evaluate any derived repressor comprising one or more amino acid substitutions. The structure of the class D TetR protein comprises 10 alpha helices with connecting loops and turns. The 3 N-terminal helices form the DNA-binding HTH domain, which has an inverse orientation as compared to HTH motifs in other DNA-binding proteins. The core of the protein, formed by helices 5-10, comprises the dimerization interface domain, and for each monomer comprises the binding pocket for ligand/effector and divalent cation cofactor (Kisker et al. (1995) J Mol Biol 247:260-180; Orth et al. (2000) Nat Struct Biol 7:215-219). Any amino acid change may comprise a non-conservative or conservative amino acid substitution. Conservative substitutions generally refer to exchanging one amino acid with another having similar chemical and/or structural properties (see, e.g., Dayhoff et al. (1978) Atlas of Protein Sequence and Structure, Natl Biomed Res Found, Washington, D.C.). Different clustering of amino acids by similarity have been developed depending on the property evaluated, such as acidic vs. basic, polar vs. non-polar, amphipathic and the like and be used when evaluating the possible effect of any substitution or combination of substitutions.

[0151] Numerous variants of TetR have been identified and/or derived and extensively studied. In the context of the tetracycline repressor system, the effects of various mutations, modifications and/or combinations thereof have been used to extensively characterize and/or modify the properties of tetracycline repressors, such as cofactor binding, ligand binding constants, kinetics and dissociation constants, operator binding sequence constraints, cooperativity, binding constants, kinetics and dissociation constants and fusion protein activities and properties. Variants include TetR variants with a reverse phenotype of binding the operator sequence in the presence of tetracycline or an analog thereof, variants having altered operator binding properties, variants having altered operator sequence specificity and variants having altered ligand specificity and fusion proteins. See, for example, Isackson & Bertrand (1985) PNAS 82:6226-6230; Smith & Bertrand (1988) J Mol Biol 203:949-959; Altschmied et al. (1988) EMBO J 7:4011-4017; Wissmann et al. (1991) EMBO J 10:4145-4152; Baumeister et al. (1992) J Mol Biol 226:1257-1270; Baumeister et al. (1992) Proteins 14:168-177; Gossen & Bujard (1992) PNAS 89:5547-5551; Wasylewski et al. (1996) J Protein Chem 15:45-58; Berens et al. (1997) J Biol Chem 272:6936-6942; Baron et al. (1997) Nucl Acids Res 25:2723-2729; Helbl & Hillen (1998) J Mol Biol 276:313-318; Urlinger et al. (2000) PNAS 97:7963-7968; Kamionka et al. (2004) Nucl Acids Res 32:842-847; Bertram et al. (2004) J Mol Microbiol Biotechnol 8:104-110; Scholz et al. (2003) J Mol Biol 329: 217-227; and US2003/0186281.

### EXAMPLES

[0152] The following examples are provided to illustrate some embodiments of the invention, but should not be construed as defining or otherwise limiting any aspect, embodiment, element or any combinations thereof. Modifications of any aspect, embodiment, element or any combinations thereof are apparent to a person of skill in the art.

### Example 1

### Sulfonylurea-Responsive Repressors (SuRs)

### A. Computational Modeling

[0153] The 3-D crystal structures of the class D tetracycline repressor (isolated from E. coli; TET-bound dimer, 1DU7 (Orth et al. (2000) Nat Struct Biol 7:215-219); and DNA-bound dimer, 1QPI (Orth et al. (2000) Nat Struct Biol 7:215-219), were used as the design scaffold for computational replacement of the tetracycline (TET) molecule by the thifensulfuron-methyl (Ts, Harmony®) molecule in the ligand binding pocket. TET and sulfonylureas (SUs) are generally similar in size and have aromatic ring-based structures with hydrogen bond donors and acceptors. However, there are notable differences between the tetracycline family and SU family of molecules. TET is internally rigid and fairly flat, with one highly-hydrogen-bonding face with hydroxyls and ketones, log P ˜−0.3. Sulfonylureas (SUs) are more highly flexible and aromatic, with a core sulfonyl-urea moiety typically connecting a substituted benzene, pyridine, or thiophene (as in the case of Harmony®) on one side with a substituted pyrimidine or 1,3,5-triazine on the other side. Although having different functional groups, the logP of Harmony® is similar (˜0.02 at pH 7) to that of TET. A best-posed Harmony® molecule was positioned by molecular modeling in the TetR binding pocket in silico. Based on this model, seventeen amino acid residue positions (60, 64, 82, 86, 100, 104, 105, 113, 116, 134, 135, 138 and 139 from monomer A and positions 147, 151, 174 and 177 from monomer B, using TetR(B) numbering) were determined to be in sufficiently close proximity to a docked Harmony® as to be recruited into a binding surface. Computational side-chain optimization was employed to design sets of amino acids at each of the 17 positions deemed to be most compatible with SU binding. The choice of amino acids at the library positions was dictated by steric and physicochemical considerations to fit ligand docking into the model ligand pocket. This resulted in a library with (4, 5, 4, 4, 5, 3, 8, 11, 10, 10, 8, 8, 7, 9, 6, 7 and 5) amino acids at the 17 positions, for a total designed library size of 4×10¹³.

[0154] The wild type class B TetR from Tn10 was chosen as the starting molecule for generation of shuffling derivatives (SEQ ID NO:2). It is slightly different than the sequence used in computational design (P0ACT4, class D, for which the high-resolution crystal structure 1DU7 is available), but only subtly affects ligand binding.

[0155] The starting polynucleotide encoding TetR was synthesized commercially and restriction sites were added for ease of library construction and further manipulations (DNA2.0, Menlo Park, Calif., USA). Added restriction sites include an NcoI site at the 5′ end, a SacI site 5′ of the ligand binding domain (LBD) and an AscI site following the stop codon. Library construction can be localized in a ˜480 bp DNA segment containing the ligand binding region to avoid inadvertent mutations in the other regions, such as the DNA binding domain. The synthetic gene was operably linked downstream of an arabinose inducible promoter, P_{BAD}, using NcoI/AscI to create TetR expression vector pVER7314. The addition of the NcoI site at the 5′ end of the coding region resulted in the insertion of a glycine after the N-terminal methionine at amino acid position one (SEQ ID NO:2). This sequence was used as the wild type TetR control in all assays unless otherwise noted, and observed activity was equivalent to TetR without the serine insertion (SEQ ID NO:1). However, all references to amino acid positions and changes designed and observed use the amino acid numbering of wild type TetR(B) (207 aa) e.g., SEQ ID NO:1.

### B. Library Design

[0156] Due to the large number of designed substitutions at many positions in close proximity with one another the computed library (Table 1, Designed Library) was not easily encodable with a small number of degenerate codons. For this reason, the sequence library fabricated and tested in the lab featured the designed amino acid set at 6/17 positions, slightly enlarged at 1/17 positions, and fully degenerate (NNK codon) at 10/17 positions (Table 1). This resulted in much higher predicted sequence diversity, a total of 3×10¹⁹ sequences.

TABLE 1

| | WT | | |
|---|---|---|---|
| Residue | residue | Designed Library | Actual Library |
| 60 | L | A L K M | A L K M |
| 64 | H | A N Q H L | A N Q H L |
| 82 | N | A N S T | A N S T |
| 86 | F | M F W Y | M F W Y |
| 100 | H | H M F W Y | All 20 aa's |
| 104 | R | A R G | A R G |
| 105 | P | A N D G P S T V | All 20 aa's |
| 113 | L | A R N D Q E K M S T V | A R N D Q E K M S T V I P L G H |
| 116 | Q | A R N Q E I K M T V | All 20 aa's |
| 134 | L | A R I L K M F W Y V | All 20 aa's |
| 135 | S | A R N Q H K S T | A R N Q H K S T |
| 138 | G | A H K M F S Y W | All 20 aa's |
| 139 | H | A R Q H L K Y | All 20 aa's |
| 147 | E | A R Q E H L K M Y | All 20 aa's |
| 151 | H | A Q H K I L | All 20 aa's |
| 174 | I | A R Q E L K M | All 20 aa's |
| 177 | F | A R L K M | All 20 aa's |

[0157] Library 1 oligonucleotides were designed and assembled by overlap extension (Ness et al. (2002) Nat Biotech 20:1251-1255) to generate a PCR fragment bordered by SacI/AscI restriction sites. Conditions for assembly of all library fragments were as follows: oligonucleotides representing the library are normalized to a concentration of 10 μM and then equal volumes mixed to create a 10 μM pool. PCR amplification of library fragments was performed in six identical 25 μl reactions containing: 1 μM pooled library oligos; 0.5 μM of each rescue primer: L1:5′ and L1:3′ and 200 μM dNTP's in a Herculase II directed reaction (Stratagene, La Jolla, Calif., USA). Conditions for PCR were 98° C. for 1 min (initial denature), followed by 25 cycles of 95° C. denature for 20 seconds, annealing for 45 seconds between 45° C. and 55° C. (gradient), then extending the template for 30 seconds at 72° C. A final extension of 72° C. for 5 minutes completes the reaction. Wild type TetR(B) is excised from the P_{BAD}-tetR expression vector pVER7314 by digestion with SacI/AscI. The pVER7314 backbone fragment is treated with calf intestinal phosphatase and purified, then the fully extended library fragment pool (˜500 bp) digested with SacI/AscI restriction enzymes are inserted to generate the L1 plasmid library. Approximately 50 random clones from library L1 were sequenced and the information compiled for quality control purposes. The results indicated that nearly all amino acids targeted in the diversity set were represented (data not shown). Sequencing revealed that 17% of the sequences contained stop codons. This is less than the predicted 27% (e.g., 10 positions having 1/32 codons be a stop codon, 1−(31/32)¹⁰˜27%). Additionally, sequence analysis showed that 13% of the clones had frame shifts due to mistakes in the overlap extension process. Thus, overall approximately 30% of the library consisted of clones encoding truncated polypeptides.

### C. Screen Set Up

[0158] In order to test the library for rare clones reacting to thifensulfuron-methyl (Ts) a sensitive E. coli based genetic screen was developed. The screen is a modification of an established assay system (Wissmann et al. (1991) Genetics 128:225-232). The screen consists of a repressor pre-screen followed by an induction screen. For the repressor prescreen a genetic cascade was developed whereby an nptIII gene encoding kanamycin resistance is under the control of a lac promoter. The lac promoter is repressed by the Lac repressor encoded by lacI, whose expression is in turn controlled by the tet promoter (PtetR). The tet promoter is repressed by TetR which blocks LacI production and thus ultimately enables kanamycin resistance to be expressed.

[0159] Since the tet regulon has bivalent promoters, one promoter for tetR and one promoter for tetA, the same strain was engineered with the E. coli lacZ gene encoding enzyme reporter β-galactosidase under control of the tetA promoter (PtetA). The dual regulon encoding both lacI and lacZ was then bordered by strong transcriptional terminators: the E. coli RNA ribosomal operon terminator rrnB T1-T2 (Ghosh et al. (1991) J Mol Biol 222:59-66) and the E. coli RNA polymerase subunit C terminator rpoC, such that spurious transcripts read in the direction of either tet promoter would not interfere with expression of any other transcript. In the presence of functional TetR, the strain exhibits a lac⁻ phenotype and colonies can be easily scored for induction by novel chemistry with X-gal, wherein induction gives increased blue colony color. In addition, induction with novel chemistry in liquid cultures can be measured quantitatively by employing β-galactosidase enzyme assays with either colorimetric or fluorimetric substrates.

[0160] In order to obtain better penetration of SU compounds into E. coli (Robert LaRossa—DuPont: personal communication), the host strain tolC locus was knocked out with the incoming Plac-nptIII reporter. A strong transcriptional terminator, T22 from S. typhimurium phage P22, was placed upstream of the lac promoter to prevent unregulated leaky expression of the conditional kanamycin resistance marker. The name of the final engineered strain is E. coli KM3.

[0161] The population of shuffled tetR LBD's was cloned into an Ap^{r}/ColE1 based vector pVER7314 behind the P_{BAD} promoter. This was designed to enable fine control of TetR expression by variation of arabinose concentrations in the growth medium (Guzman et al. (1995) J Bacteriol 177:4121-4130). Despite being under the control of the P_{BAD} promoter, TetR protein is expressed at a sufficient level in the absence of added arabinose to enable selection for kanamycin resistance in strain KM3. Nevertheless, expression can be increased by addition of arabinose, for example, if a change in assay stringency is desired.

### D. Library Screening

[0162] Following assembly of L1 oligos and capture in vector pVER7314, the resulting library was transformed into E. coli strain KM3 and plated on LB containing 50 μg/ml carbenicillin to select for library plasmids, and 60 μg/ml kanamycin to select for the active repressor population in the absence of target ligand (“apo-repressors”). DNA sequence analysis of this selected population indicated that this step highly enriched several library positions. In addition, this step eliminated clones with premature stop codons and or frame shift mutations. Subsequently, these apo-repressor sequences were screened for alteration in repressor activity in the presence of Harmony® (Ts) by replica plating the Km^{r} pre-selected population from liquid cultures in 384-well format onto M9 agar containing 0.1% glycerol as carbon source, 0.04% casamino acids (to prevent branched chain amino acid starvation caused by sulfonylurea application), 50 μg/ml carbenicillin for plasmid maintenance, 0.004% X-gal to detect β-galactosidase activity, and +/−SU inducer Ts at 20 μg/ml. Initial hits were identified from a population of nearly 20,000 colonies screened for response to Ts following incubation at 30° C. for 2 days. Fourteen putative hits identified were then re-tested under the same conditions but in 96-well format. DNA sequence analysis revealed that clones L1-3 and L1-19 are identical and that the most intensely responding hits (L-2,-3(19), -5, -9, -11 and -20) had significant enrichment at several library positions, indicating an involvement in ligand interaction, directly or indirectly. The same library was then re-screened to identify a further 10 hits to bring the total number of clones to 23.

[0163] All 23 putative hits were subsequently screened in the same plate assay format with a panel of nine sulfonylurea (SU) compounds registered for commercial use (Table 2), wherein 11 hits were found to respond significantly to other SU ligands (Table 3). For this experiment, E. coli clones encoding L1 hits or wt TetR (SEQ ID NO:2) were arrayed in 96-well format and stamped onto M9 X-gal assay media with or without test SU compounds at 20 μg/ml. Following 48 hrs growth at 30° C. the plates were digitally imaged and the colony color intensity converted to relative values of β-galactosidase activity. Inducers used: thifensulfuron (Ts), metsulfuron (Ms), sulfometuron (Sm), ethametsulfuron (Es), tribenuron (Tb), chlorimuron (Ci), nicosulfuron (Ns), rimsulfuron (Rs), chlorsulfuron (Cs) at 20 ppm and anhydrotetracycline (atc) as the positive control at 0.4 μM for induction of wt TetR. Some sulfonylurea compounds, particularly chlorimuron, ethametsulfuron, and chlorsulfuron were more potent activators than the starting ligand Harmony®.

TABLE 2
SU Compound

| Common Name | Product | Commercial Use |
|---|---|---|
| Thifensulfuron-methyl (Ts) | Harmony ® | Cereals, corn, soybean |
| Metsulfuron-methyl (Ms) | Ally ® | Cereals, pasture |
| Sulfometuron-methyl (Sm) | Oust ® | Vegetation management |
| Ethametsulfuron-methyl (Es) | Muster ® | Canola |
| Tribenuron-methyl (Tb) | Express ® | Cereal, sunflower |
| Chlorimuron-ethyl (Ci) | Classic ® | Soybean |
| Nicosulfuron (Ns) | Accent ® | Corn |
| Rimsulfuron (Rs) | Matrix ® | Corn, tomato, potato |
| Chlorsulfuron (Cs) | Glean ® | Cereals |

TABLE 3

| | Inducer | | | | | | | | | | |
|---|---|---|---|---|---|---|---|---|---|---|---|
| clone | None | Ts | Ms | Sm | Es | Tb | Ci | Ns | Rs | Cs | atc |
| L1-2 | 1.0 | 1.6 | 1.9 | 4.7 | 5.8 | 1.7 | 13.6 | 1.3 | 1.3 | 4.1 | 1.2 |
| L1-7 | 0.0 | 0.1 | 0.2 | 6.4 | 0.1 | 0.2 | 16.5 | 0.1 | 0.2 | 3.1 | 0.0 |
| L1-9 | 0.3 | 1.1 | 1.2 | 0.6 | 11.8 | 0.4 | 9.8 | 0.3 | 0.4 | 23.6 | 0.3 |
| L1-20 | 1.4 | 2.6 | 12.4 | 6.0 | 15.0 | 2.6 | 13.5 | 1.6 | 2.0 | 22.0 | 2.0 |
| L1-22 | 0.1 | 0.0 | 0.1 | 17.2 | 0.3 | 0.3 | 10.4 | 0.2 | 0.1 | 0.2 | 0.0 |
| L1-24 | 0.1 | 0.3 | 0.4 | 3.1 | 0.2 | 1.6 | 22.1 | 0.3 | 0.3 | 3.3 | 0.1 |
| L1-28 | 0.0 | 0.1 | 18.8 | 1.1 | 0.8 | 0.3 | 14.6 | 0.1 | 0.2 | 5.8 | 0.0 |
| L1-29 | 0.0 | 0.0 | 13.5 | 2.7 | 1.7 | 0.3 | 20.9 | 0.1 | 0.1 | 15.8 | 0.0 |
| L1-31 | 0.3 | 0.9 | 0.5 | 0.9 | 13.7 | 0.1 | 1.1 | 0.5 | 0.4 | 1.4 | 0.4 |
| L1-38 | 9.5 | 16.7 | 14.7 | 18.3 | 14.8 | 15.8 | 15.3 | 8.7 | 9.5 | 14.0 | 6.4 |
| L1-44 | 0.2 | 1.9 | 2.9 | 0.4 | 2.4 | 0.4 | 6.7 | 0.4 | 0.3 | 12.0 | 0.2 |
| TetR | 0.0 | 0.0 | 0.0 | 0.1 | 0.0 | 0.1 | 0.1 | 0.1 | 0.1 | 0.0 | 25.0 |

[0164] The initial screenings of library 1 also detected library members having reverse repressor activity (SEQ ID NO:412-419), wherein the polypeptide was bound to the operator in the presence of SU ligand. These hits showed β-galactosidase expression without SU ligand, which was substantially reduced upon addition of the ligand, for example thifensulfuron. These hits were subsequently screened in the same plate assay format as described above with the panel of nine sulfonylurea (SU) compounds registered for commercial use (Table 3), wherein 8 hits were found to respond significantly to other SU ligands (Table 4).

TABLE 4

| | Inducer | | | | | | | | | | |
|---|---|---|---|---|---|---|---|---|---|---|---|
| clone | Blank | Ts | Ms | Sm | Es | Tb | Ci | Ns | Rs | Cs | atc |
| L1-18 | 1.34 | 1.13 | 0.79 | 0.94 | 0.37 | 1.65 | 0.36 | 1.44 | 2.55 | 1.22 | 2.35 |
| L1-21 | 2.88 | 0.79 | 0.89 | 2.39 | 0.61 | 2.13 | 0.07 | 2.74 | 2.31 | 0.89 | 2.81 |
| L1-25 | 1.17 | 0.64 | 0.32 | 0.63 | 0.13 | 1.72 | 0.11 | 1.21 | 1.08 | 0.28 | 1.22 |
| L1-33 | 7.59 | 5.51 | 4.29 | 5.02 | 2.11 | 4.71 | 0.76 | 5.34 | 10.32 | 3.74 | 8.25 |
| L1-34 | 2.37 | 2.97 | 1.47 | 2.00 | 1.33 | 2.26 | 0.43 | 2.91 | 2.30 | 0.85 | 3.68 |
| L1-36 | 1.52 | 0.48 | 0.38 | 0.50 | 0.20 | 0.57 | 0.21 | 1.81 | 1.84 | 0.24 | 1.70 |
| L1-39 | 3.65 | 1.42 | 0.75 | 0.91 | 0.60 | 0.97 | 0.49 | 3.03 | 4.72 | 0.89 | 4.92 |
| L1-41 | 4.05 | 1.46 | 0.56 | 0.67 | 0.18 | 1.41 | 0.39 | 2.75 | 4.05 | 0.61 | 4.21 |
| TetR | 0.00 | 0.08 | 0.08 | 0.23 | 0.06 | 0.13 | 0.18 | 0.18 | 0.20 | 0.15 | 10.45 |

E. Correlation of First Round Shuffling Results with the Structural Model

[0165] Significant enrichment occurred at most library positions, where enrichment includes biases favoring particular amino acids and biases disfavoring particular amino acids. The initial screening involved two stages to identify both repressor and de-repressor functions. Enrichment occurred in both stages of screening. In the first stage, positions were enriched by the selection for “apo repressors’, that is, proteins that repress gene transcription in the absence of ligand. In the second stage, positions were enriched by the selection for “activators”, that is, proteins that allow gene transcription in the presence of ligand. Positions may be enriched by either selection criterion, by both criteria, or by neither. The first-round screening results for repressor activity are summarized below:

| | Amino Acid Bias Observed | | |
|---|---|---|---|
| Position | Apo repressor | SU Induction | Both |
| 60 | | L (not K) | |
| 64 | | Q, N (not L, A) | |
| 82 | N (not A, T) | A (not N, S) | |
| 86 | (not M) | M (not W) | |
| 100 | R (not K, Q) | C, W (not H, K, Q) | |
| 104 | G | A | |
| 105 | C, G, L, V (not H, K) | L, W (not G, S) | L |
| 113 | A (not G, P) | A, I (not D, G) | A |
| 116 | (not GL) | M, V (not A, R) | |
| 134 | M, S | I, R, W (not G) | |
| 135 | K, R (not H, S) | Q, R (not A, T) | R |
| 138 | (not T) | A, C, R, V (not L, P, Q, T) | |
| 139 | R (not H) | T (not L, P) | |
| 147 | (not A, C) | R, W (not A, S) | |
| 151 | R (not C, G, Q) | M, R (not V) | R |
| 174 | V (not L, R) | W (not F, L) | |
| 177 | T (not S) | K, L (not P, T) | |

Several rounds of library design and shuffling were completed. Resulting polynucleotides and encoded SuRs are provided in the Sequence Listing.

### Summary

[0166] FIG. 1 provides a cumulative summary of the introduced diversity and observed amino acids in active SuRs obtained from the screening assays. Even though some positions were strongly biased (i.e. observed more frequently in the selected population) as indicated by larger bolded type, the entirety of introduced diversity was observed in the full hit populations.

### Example 2

### Sulfonylurea Repressor Ligand Binding Domain Fusions

[0167] The ligand binding domains from the sulfonylurea repressors provided herein can be fused to alternative DNA binding domains in order to create further sulfonylurea repressors that selectively and specifically bind to other DNA sequences (e.g., Wharton & Ptashne (1985) Nature 316:601-605). Many domain swapping experiments have been published, demonstrating the breadth and flexibility of this approach. Generally, an operator binding domain or specific amino acid/operator contact residues from a different repressor system will be used, but other DNA binding domains can also be used. For example, a polynucleotide encoding a TetR(D)/SuR chimeric polypeptide consisting of the DNA binding domain from TetR(D) (e.g., amino acid residues 1-50) and ligand binding domain of a SuR residues (e.g., amino acid residues 51-208 from TetR(B) can be constructed using any standard molecular biology method or combination thereof, including restriction enzyme digestion and ligation, PCR, synthetic oligonucleotides, mutagenesis or recombinational cloning. For example, a polynucleotide encoding a SuR comprising a TetR(D)/SuR chimera can be constructed by PCR (Landt et al. (1990) Gene 96:125-128; Schnappinger et al. (1998) EMBO J 17:535-543) and cloned into a suitable expression cassette and vector. Any other TetOp binding domains can be substituted to produce a SuR that specifically binds to the cognate tet operator sequence.

[0168] In addition, mutant TetO^{c} binding domains from variant TetR's having suppressor activity on constitutive operator sequences (tetO-4C and tetO-6C) can be used (see, e.g., Helbl & Hillen (1998) J Mol Biol 276:313-318; and Helbl et al. (1998) J Mol Biol 276:319-324). Further, the polynucleotides encoding these DNA binding domains can be modified to change their operator binding properties. For example, the polynucleotides can be shuffled to enhance the binding strength or specificity to a wild type or modified tet operator sequence, or to select for specific binding to a new operator sequence.

[0169] Additional variants could be made by fusing a SuR repressor, or a SuR ligand binding domain to an activation domain. Such systems have been developed using Tet repressors. For example, one system converted a tet repressor to an activator via fusion of the repressor to a transcriptional transactivation domain such as herpes simplex virus VP16 and the tet repressor (tTA, Gossen & Bujard (1992) PNAS 89:5547-5551). The repressor fusion is used in conjunction with a minimal promoter which is activated in the absence of tetracycline by binding of tTA to tet operator sequences. Tetracycline inactivates the transactivator and inhibits transcription.

### Example 3

### Operator Binding

[0170] To confirm that sulfonylurea ligands were binding directly to the modified repressor molecules and causing derepression, an in vitro tet operator gel shift study was undertaken.

[0171] An electrophoretic gel mobility shift assay (EMSA) of EsR variants was done to monitor binding to the tet operator (tetO) sequence and response of the complex to inducers Es and Cs. TetO consists of a synthetic 48 bp tetO-containing fragment created from hybridization of oligonucleotide tetO1 (SEQ ID NO:837): 5′-CCTAATTTTTGTTGACACTCTATCATTGATAGAGTTATTTTACCACTC-3′ and complementary oligonucleotide tetO2 (SEQ ID NO:838): 5′-GGATTAAAAACAACTGTGAGATAGTAACTATCTCAATAAAATGGTGAG-3′ The tet operator is shown in bold.

[0172] An oligonucleotide and its complement of the same size containing no palindromic sequence was used as a control (SEQ ID NO:839): 5′-CCTAATTTTTGTTGACTGTGTTAGTCCATAGCTGGTATTTTACCACTC-3′ and complementary oligonucleotide (SEQ ID NO:840): 5′-GGATTAAAAACAACTGACACAATCAGGTATCGACCATAAAATGGTGAG-3′

[0173] Five pmol of TetO or control DNA was mixed with the indicated amounts of ethametsulfuron repressor protein (L7A11, SEQ ID NO:409) or BSA control with or without inducer in complex buffer containing 20 mM Tris-HCl (pH8.0) and 10 mM EDTA. The mixture was incubated at room temperature for 0.5 hour before loading onto the gel. The reaction was electrophoresed on a Novex 6% DNA retardation gel (Invitrogen) at room temperature, 38 V in 0.5× TBE buffer for about 2 hours. DNA was detected by ethidium bromide staining. These results (not shown) demonstrated that the modified repressors bind to operator DNA and are released from the operator sequence in an inducer-specific and dose dependent manner.

### Example 4

### Binding and Dissociation Constants

[0174] Select SU repressors were further characterized for operator and ligand binding, affinity and dissociation kinetics using Biacore™ SPR technology (Biacore, GE Healthcare, USA). The technology is based on surface plasmon resonance (SPR), an optical phenomenon that enables detection of unlabeled interactants in real time. The SPR-based biosensors can be used in determination of active concentration, screening and characterization in terms of both affinity and kinetics.

[0175] The kinetics of an interaction, i.e., the rates of complex formation (kₐ) and dissociation (k_{d}), can be determined from the information in a sensorgram. If binding occurs as sample passes over a prepared sensor surface, the response in the sensorgram increases. If equilibrium is reached, a constant signal is seen. Replacing the sample with buffer causes the bound molecules to dissociate and the response decreases. Biacore evaluation software generates the values of kₐ and k_{d} by fitting the data to interaction models.

[0176] The affinity of an interaction is determined from the level of binding at equilibrium (seen as a constant signal) as a function of sample concentration. Affinity can also be determined from kinetic measurements. For a simple 1:1 interaction, the equilibrium constant K_{D} is the ratio of the kinetic rate constants, k_{d}/kₐ.

### A. Operator Binding Characterization of Repressors

| Repressor | kₐ (M⁻¹ s⁻¹) | K_{d} (s⁻¹) | K_{D} (nM) |
|---|---|---|---|
| Wt TetR | 3.3 × 10⁵ | 3.0 × 10⁻³ | 9.0 ± 1.0 |
| L7-1C03-A5 | 4.7 × 10⁴ | 7.8 × 10⁻³ | 150 ± 5 |
| L7-3E03-D1 | 5.5 × 10⁴ | 1.1 × 10⁻² | 200 ± 50 |
| L7-1F08-A11 | 7.1 × 10⁴ | 1.7 × 10⁻² | 250 ± 120 |
| L7-1G06-B2 | 4.6 × 10⁴ | 1.9 × 10⁻² | 430 ± 160 |

### B. SU Binding Characterization of Repressors

KD (μM)

| Repressor | Es +Mg | Es −Mg | Cs +Mg | Cs −Mg | ATC +Mg |
|---|---|---|---|---|---|
| L7-1C03-A5 | 0.46 | 1.78 | 83 | 365 | Null |
| L7-1F08-A11 | 0.45 | 1.09 | 40 | 92 | Null |
| L7-1G06-B2 | 0.53 | 2.15 | 60 | 255 | Null |
| L7-3E03-D1 | 0.73 | 2.15 | 48 | 115 | Null |
| Wt TetR | Null | Null | Null | Null | 0.0036 |

### Example 5

### Plant Assays

[0179] A. Nicotiana benthamiana Leaf Infiltration Assay

[0180] An in planta transient assay system was developed to rapidly confirm functionality of candidate SU-responsive chemical switch systems in planta prior to testing in transgenic plants. An Agrobacterium based leaf infiltration assay was developed to measure repression and derepression activities. N. benthamiana leaves were infiltrated with a mixture of reporter and effector (repressor) Agrobacterium strains such that reporter activity is reduced by ˜90% in the presence of the effector and then derepressed following treatment with inducer.

[0181] Two ethametsulfuron repressors, EsR A11 and EsR D01, were selected for testing dose response to ethametsulfuron in conjunction with a wild type TetR control. Three test strains were derived by transformation of A. tumefaciens EHA105 with three different T-DNA based vectors. Agrobacterium strains harboring binary vectors with a 35S::tetO-Renilla Luciferase reporter and dPCSV-tetR or -SuR effector variants were constructed. In addition to these tester cultures, an existing Agrobacterium strain harboring a dMMV-GFP T-DNA was added to the assay mixture to monitor the progression of Agrobacterium infection for sampling purposes.

[0182] To test the system for chemical switch activation, mixtures of tester Agrobacterium cultures containing 10% 35S::tetO-ReLuc reporter Agro, 10% dMMV-GFP Agro and 80% dPCSV-wt tetR Agro were infiltrated into N. benthamiana leaves and co-cultivated for 36 hours in the growth chamber. Infiltrated leaves were then excised and the petiole placed into water (negative control) or inducer at the test concentrations and allowed to co-cultivate for another 36 hours. Infected leaf areas were assayed for Renilla luciferase activity and inducer treatments compared. The results show significant repression of reporter activity (˜90%) with no inducer treatment (water control) for all tested repressors, and significant but incomplete induction of the EsR D01 repressor at inducer concentration as low as 0.02 ppm Es. Both EsR's were fully induced at 0.2 ppm Es whereas TetR was only fully induced at 2.0 ppm anhydrotetracycline.

B. N. tabacum BY-2 Cell Chemical Switch Assay

[0183] In addition to the leaf assay it was desired to have an in planta assay to enable high throughput screening. A system similar to the leaf assay was designed using tobacco BY-2 cell culture in 96-well format. BY-2 cell culture was transformed with a dMMV-HRA construct such that the culture would withstand treatment with target sulfonylurea test compounds. The resultant cell line grows and is fully resistant to 200 ppb chlorsulfuron.

### C. Sulfonylurea-Responsive Chemical Switch in Soybean

[0184] Any transformation protocols, culture techniques, soybean source, and media, and molecular cloning techniques can be used with the compositions and methods.

i. Transformation and Regeneration of Soybean (Glycine max)

[0185] Transgenic soybean lines are generated by particle gun bombardment (Klein et al. Nature 327:70-73 (1987); U.S. Pat. No. 4,945,050) using a BIORAD Biolistic PDS1000/He instrument and either plasmid or fragment DNA. The following stock solutions and media are used for transformation and regeneration of soybean plants:

[0186] Stock solutions:
[0187] Sulfate 100× Stock: 37.0 g MgSO4.7H2O, 1.69 g MnSO4.H2O, 0.86 g ZnSO4.7H2O, 0.0025 g CuSO4.5H2O
[0188] Halides 100× Stock: 30.0 g CaCl2.2H2O, 0.083 g KI, 0.0025 g CoCl2.6H2O
[0189] P, B, Mo 100× Stock: 18.5 g KH2PO4, 0.62 g H3BO3, 0.025 g Na2MoO4.2H2O
[0190] Fe EDTA 100× Stock: 3.724 g Na2EDTA, 2.784 g FeSO4.7H2O
[0191] 2,4-D Stock: 10 mg/mL 2,4-Dichlorophenoxyacetic acid
[0192] B5 vitamins, 1000× Stock: 100.0 g myo-inositol, 1.0 g nicotinic acid, 1.0 g pyridoxine HCl, 10 g thiamine HCL.

[0193] Media (per Liter):
[0194] SB199 Solid Medium: 1 package MS salts (Gibco/BRL, Cat. No. 11117-066), 1 mL B5 vitamins 1000× stock, 30g Sucrose, 4 ml 2,4-D (40 mg/L final concentration), pH 7.0, 2 g Gelrite
[0195] SB1 Solid Medium: 1 package MS salts (Gibco/BRL, Cat. No. 11117-066), 1 mL B5 vitamins 1000× stock, 31.5 g Glucose, 2 mL 2,4-D (20 mg/L final concentration), pH 5.7, 8 g TC agar
[0196] SB196: 10 mL of each of the above stock solutions 1-4, 1 mL B5 Vitamin stock, 0.463 g (NH4)2 SO4, 2.83 g KNO3, 1 mL 2,4 D stock, 1 g asparagine, 10 g sucrose, pH 5.7
[0197] SB71-4: Gamborg's B5 salts, 20 g sucrose, 5 g TC agar, pH 5.7.
[0198] SB103: 1 pk. Murashige & Skoog salts mixture, 1 mL B5 Vitamin stock, 750 mg MgCl2 hexahydrate, 60 g maltose, 2 g gelrite, pH 5.7.
[0199] SB166: SB103 supplemented with 5 g per liter activated charcoal.

[0200] Soybean embryogenic suspension cultures are initiated twice each month with 5-7 days between each initiation. Pods with immature seeds from available soybean plants 45-55 days after planting are picked, removed from their shells and placed into a sterilized magenta box. The soybean seeds are sterilized by shaking them for 15 min in a 5% v/v CLOROX™ solution with 1 drop of ivory soap. Seeds are rinsed using 2 1-liter bottles of sterile distilled water and those less than 3 mm are placed on individual microscope slides. The small end of the seed is cut and the cotyledons pressed out of the seed coat. Cotyledons are transferred to plates containing SB199 medium (25-30 cotyledons per plate) for 2 weeks, then transferred to SB1 for 2-4 weeks. Plates are wrapped with fiber tape. After this time, secondary embryos are cut and placed into SB196 liquid media for 7 days.

[0201] Soybean embryogenic suspension cultures (cv. Jack) are maintained in 50 mL liquid medium SB196 on a rotary shaker, 150 rpm, 26° C. with cool white fluorescent lights on 16:8 h day/night photoperiod at light intensity of 60-85 μE/m2/s. Cultures are subcultured every 7 days to two weeks by inoculating approximately 35 mg of tissue into 50 mL of fresh liquid SB196 (the preferred subculture interval is every 7 days).

### Preparation of DNA for Bombardment:

[0202] Intact plasmid DNA or DNA fragments containing only the recombinant DNA expression cassette(s) of interest can be used in particle gun bombardment procedures. For every seventeen bombardment transformations, 85 μL of suspension is prepared containing 1 to 90 picograms (pg) of plasmid DNA per base pair of each DNA plasmid. Both recombinant DNA plasmids are co-precipitated onto gold particles as follows. The DNAs in suspension are added to 50 μL of a 10-60 mg/mL 0.6 μm gold particle suspension and then combined with 50 μL CaCl2 (2.5 M) and 20 μL spermidine (0.1 M). The mixture is vortexed for 5 sec, spun in a microfuge for 5 sec, and the supernatant removed. The DNA coated particles are then washed once with 150 μL of 100% ethanol, vortexed and pelleted, then resuspended in 85 μL of anhydrous ethanol. Five μL of the DNA coated gold particles are then loaded on each macrocarrier disk.

[0203] Approximately 150 to 250 mg of two-week-old suspension culture is placed in an empty 60 mm×15 mm Petri plate and the residual liquid removed from the tissue using a pipette. The tissue is placed about 3.5 inches away from the retaining screen and each plate of tissue is bombarded once. Membrane rupture pressure is set at 650 psi and the chamber is evacuated to −28 inches of Hg.

[0204] After bombardment, tissue from each bombarded plate is divided and placed into two flasks of SB196 liquid culture maintenance medium per plate of bombarded tissue. Seven days post bombardment, the liquid medium in each flask is replaced with fresh SB196 culture maintenance medium supplemented with 100 ng/ml selective agent (selection medium). Transformed soybean cells can be selected using a sulfonylurea (SU) compound such as 2 chloro N((4 methoxy 6 methy 1,3,5 triazine 2 yl)aminocarbonyl)benzenesulfonamide (common names: DPX-W4189 and chlorsulfuron). Chlorsulfuron (Cs) is the active ingredient in the DuPont sulfonylurea herbicide, GLEAN®. The selection medium containing SU is replaced every two weeks for 6-8 weeks. After the 6-8 week selection period, islands of green, transformed tissue are observed growing from untransformed, necrotic embryogenic clusters. These putative transgenic events are isolated and kept in SB196 liquid medium with Cs at 100 ng/ml for another 2-6 weeks with media changes every 1-2 weeks to generate new, clonally propagated, transformed embryogenic suspension cultures. Embryos spend a total of around 8-12 weeks in contact with Cs. Suspension cultures are subcultured and maintained as clusters of immature embryos and also regenerated into whole plants by maturation and germination of individual somatic embryos.

[0205] Somatic embryos became suitable for germination after four weeks on maturation medium (1 week on SB166 followed by 3 weeks on SB103). They are then removed from the maturation medium and dried in empty Petri dishes for up to seven days. The dried embryos are then planted in SB71 4 medium where they are allowed to germinate under the same light and temperature conditions as described above. Germinated embryos are transferred to potting medium and grown to maturity for seed production.

ii. Vector Construction and Testing

[0206] Plasmids were made using standard procedures and from these plasmids DNA fragments were isolated using restriction endonucleases and agarose gel purification. Each DNA fragment contained three cassettes. Cassette 1 is a reporter expression cassette; Cassette 2 is the repressor expression cassette; and, Cassette 3 is an expression cassette providing an HRA gene. The repressors tested in Cassette 2 are described in Table 5. The polynucleotides comprising the repressor coding region were synthesized to comprise plant preferred codons. In all cases Cassette 1 contained a 35S cauliflower mosaic virus promoter having three tet operators introduced near the TATA box (Gatz et al. (1992) Plant J 2:397-404 (3XOpT 35S)) driving expression of DsRed followed by the 35S cauliflower mosaic virus 3′ terminator region. In all cases cassette three contained the S-adenosylmethionine synthase promoter followed by the HRA version of the acetolactose synthase (ALS) gene followed by the Glycine max ALS 3′ terminator. The HRA version of the ALS gene confers resistance to sulfonylurea herbicides. EF1A1 is the promoter of a soybean translation elongation factor EF1 alpha described in US2008/0313776.

TABLE 5

| Fragment | Fragment | | Repressor | Repressor | Fragment |
|---|---|---|---|---|---|
| Name | alias | Cassette 2 | alias | SEQ ID | SEQ ID |
| PHP37586A | CHSW004 | EF1A1::EsR1::Nos3′ | L7-IC3-A5 | 408 | 841 |
| PHP37587A | CHSW005 | EF1A1::EsR2::Nos3′ | L7-1F8-A11 | 409 | 842 |
| PHP37588A | CHSW006 | EF1A1::EsR2::Nos3 | L7-1G6-B2 | 410 | 843 |
| PHP37589A | CHSW007 | EF1A1::EsR4::Nos3′ | L7-3E3-D1 | 411 | 844 |
| PHP39389A | CHSW010 | EF1A1::EsR5::CaMV35S3′ | L12-1-10 | 406 | 845 |
| PHP39390A | CHSW011 | EF1A1::EsR6::CaMV35S3′ | L13-2-23 | 407 | 846 |

[0207] DNA fragments were used for soybean transformation as described above. Plants were regenerated and leaf discs (˜0.5 cm) were harvested from young leaves. The leaf discs were incubated in SB103 liquid media containing 0 ppm, 0.5 ppm or 5 ppm ethametsulfuron for 2-5 days. Ethametsulfuron (product number PS-2183) was purchased from Chem Service (West Chester, Pa.) and solubilized in either 10 mM NaOH or 10 mM NH₄OH. On each day leaf discs were examined under a dissecting microscope with a DsRed band pass filter. The presence of DsRed was scored visually.

[0208] Plants that expressed DsRed at 0 time were scored as leaky. Plants that did not express DsRed after five days were scored as negative. Plants that expressed DsRed after addition of ethametsulfuron were scored as inducible. Results from the experiments are shown in Table 6.

TABLE 6

| | | Total | % | % | % |
|---|---|---|---|---|---|
| Name | Alias | Events | Leaky | Negative | Inducible |
| PHP37586A | CHSW004 | 12 | 33 | 33 | 33 |
| PHP37587A | CHSW005 | 28 | 7 | 50 | 43 |
| PHP37588A | CHSW006 | 6 | 0 | 0 | 100 |
| PHP37589A | CHSW007 | 9 | 0 | 22 | 78 |
| PHP39389A | CHSW010* | 19 | 5 | 26 | 42 |
| PHP39390A | CHSW011* | 35 | 0 | 17 | 57 |

*In these cases the total does not equal 100% as multiple plants were examined from some events and, in some cases, different plants from the same event behaved differently.

[0209] The repressor proteins respond to ethametsulfuron as evidenced by induction of DsRed expression. Plants derived from the first four fragments showed visual evidence of DsRed after three days of incubation. Plants derived from the last two fragments showed visual evidence of DsRed after two days of incubation. The presence of DsRed was scored visually, but this was confirmed by Western Blot analysis on a selection of transformants using a rabbit polyclonal antibody (ab41336) from Abcam (Cambridge, Mass.).

[0210] Leaf punches were harvested as described above from a selection of transformants and incubated in SB103 media with 0, 5, 50, 250 and 500 ppb ethametsulfuron. At all concentrations of ethametsulfuron, leaves showed visual evidence of DsRed after three days of incubation. At the lowest concentration (5 ppb) the presence of DsRed was limited to a “halo” near the outside edge of the leaf disc.

[0211] Plants were allowed to mature. Since soybeans are self fertilizing, the T1 seeds derived from these plants would be expected to segregate 1 wild type:2 hemizygote:1 homozygote if only one transgene locus was created during transformation. Sixteen seeds from five different events were planted and allowed to germinate. Leaf punches were collected from young seedlings and incubated in SB103 media with 0 and 5 ppm ethametsulfuron. Leaf discs were scored for DsRed expression and 0 and 3 days and results are shown in Table 7.

TABLE 7

| | | Total | # | # | # |
|---|---|---|---|---|---|
| | | # Seeds | Leaky | Negative | Inducible |
| Name | Event ID | Germinated | Plants | Plants | Plants |
| PHP37586A | 6048.3.8.3 | 11 | 0 | 2 | 9 |
| PHP37587A | 6049.2.2.4 | 12 | 0 | 5 | 7 |
| PHP37588A | 6150.3.2.1 | 14 | 0 | 1 | 13 |
| PHP37589A | 6154.4.5.1 | 15 | 0 | 15 | 0 |
| PHP39389A | 6151.4.18.1 | 12 | 3 | 9 | 0 |

### D. Sulfonylurea-Responsive Chemical Switch in Corn

[0212] To evaluate SU-responsive chemical switch systems in plants, RFP reporter constructs were constructed and transformed into maize cells via Agrobacterium using the following T-DNA configuration:
[0213] RB-35S/TripleOp/Pro::RFP-Ubi Pro::EsR-HRA cassette-PAT cassette-LB.

[0214] Using standard molecular biology and cloning techniques, T-DNA vectors having the configuration above comprising selected round 3 SU repressors (EsRs) were constructed. The polynucleotides comprising the repressor coding region were synthesized to comprise plant preferred codons. The constructs are summarized below:

| | SU repressor | SU repressor |
|---|---|---|
| Construct ID | alias (EsR) | SEQ ID |
| PHP37707 | L7-1C3-A5 | 408 |
| PHP37708 | L7-1F8-A11 | 409 |
| PHP37709 | L7-1G6-B2 | 410 |
| PHP37710 | L7-3E3-D1 | 411 |

[0215] The reporter construct T-DNA contained a CaMV35S promoter with two tet operators flanking the TATA box and one downstream adjacent to the transcription start site (Gatz et al. (1992) Plant J 2:397-404) driving expression of the red fluorescent protein gene, a ubiquitin driven SU repressor (EsR), an expression cassette containing the maize HRA gene for SU resistance and a moPAT expression cassette for selection.

[0216] Immature embryos were transformed using standard methods and media. Briefly, immature embryos were isolated from maize and contacted with a suspension of Agrobacterium, to transfer the T-DNA's containing the sulfonylurea expression cassette to at least one cell of at least one of the immature embryos. The immature embryos were immersed in an Agrobacterium suspension for the initiation of inoculation and cultured for seven days. The embryos were then transferred to culture medium containing carbinicillin to kill off any remaining Agrobacterium. Next, inoculated embryos were cultured on medium containing both carbenicillin and bialaphos (a selective agent) and growing transformed callus was recovered. The callus was then regenerated into plantlets on solid media before transferring to soil to produce mature plants. Approximately 10 single copy events from each of the constructs were sent to the greenhouse.

[0217] To evaluate de-repression, callus was transferred to medium with and without ethametsulfuron and chlorsulfuron and RFP fluorescence was observed under the microscope (not shown). Most events de-repressed and there were no obvious differences between the round three repressors tested. To evaluate de-repression in plants, seeds for single copy plants were germinated in the presence of ethamethsulfuron and fluorescence was observed and photographed. As a positive control, a vector containing the same configuration of expression cassettes as PHP37707-10, but with UBI::TetR in place of UBI::EsR, were transformed into maize immature embryos and tested for induction on doxycycline. When grown in the presence of 1 mg/l doxycycline, transgenic callus and plants containing the TetR expression cassette induced over a similar 5-6 day period.

### E. Sulfonylurea-Responsive Chemical Switch in Rice

[0218] Mature seed of rice were surface sterilized and placed on callus induction medium (Chu (N6) salts, Eriksson's vitamins, 0.5 mg/L thiamine, 2 mg/L 2,4-D, 2.1 g/L proline, 30 g/L sucrose, 300 mg/L casein hydrolysate, and 100 mg/L myo-inositol, adjusted to pH 5.8). After one week, callus was transformed using Agrobacterium LBA4404, delivering the following T-DNA:
[0219] RB-35S PRO:3xTetOp:dsRED::pinII+35S PRO::Adh intron::ESR(L13-2-23)::UBI TERM+Sb-ALS PRO::HRA::pinII-LB

[0220] Transgenic events were visually selected as RFP+ calli growing on 100 PPB ethametsulfuron. After herbicide-resistant, red calli were well established, the calli were transferred onto culture medium without ethametsulfuron, and the calli that grew out on this medium did not exhibit red fluorescence (i.e. repression had been re-established). Non-fluorescing events were then transferred to plates of medium containing varying amounts of sulfonylureas (SU). For the control, there was no SU, with additional treatments containing 100 or 500 ppb chlorsulfuron, and 100 or 500 ppb ethametsulfuron, After 20 hours of the induction treatment, micrographs were taken at the same exposure and scored (see Example 7 for scoring criteria) as shown in the table below

| Treatment | RFP Score |
|---|---|
| Control (no SU) | 0 |
| 100 ppb chlorsulfuron | 0-1 |
| 100 ppb ethametsulfuron | 1-2 |
| 500 ppb chlorsulfuron | 2-3 |
| 500 ppb ethametsulfuron | 4 |

[0221] These results clearly demonstrated that in the absence of ligand, expression of RFP in rice callus was effectively repressed, and after addition of ligand, varying degrees of de-repression occurred resulting in RFP fluorescence. Ethametsulfuron induced to a greater level than chlorsulfuron, and the 500 ppb treatment for both ligands induced to higher levels than the 100 ppb treatment.

### Example 6

### Controlled Expression Switch Systems

[0222] Any transformation protocols, culture techniques, plant, explant, seed, or tissue source, media, construct elements, molecular cloning techniques and diagnostic methods can be used with the compositions and methods.

[0223] Several construct elements are used, as indicated by common abbreviations. For convenience, these elements are described briefly. One of skill in the art is able to select alternative elements that provide similar functions and/or characteristics. In some examples, fluorescent reporters are used such as DsRED, AmCYAN, ZsGREEN, and ZsYELLOW, all of which are available from Clontech (Mountain View, Calif.). Elements from CaMV are used, including the promoter (35S Pro, 35SCaMV), an enhancer (35S Enh), and/or terminator (35S 3′, CaMV35S 3′, 35S term). Some cassettes include introns, such as an alcohol dehydrogenase intron (Adh1 intron) from maize. Various terminators are used including terminators from ubiquitin genes (ubi 3′, ubi term), nopaline synthase terminator from Agrobacterium (nos term, nos 3′), proteinase inhibitor protein terminator from potato (pinII 3′, pinII term), or acetolactose synthase (ALS) terminator from soybean (GmALS 3′, ALS term). Besides those already described, promoters include an ALS promoter from S. bicolor (SbALS pro). Coding regions include acetolactose synthase (ALS) variants that provide SU resistance (HRA), developmental genes such as ovule development protein (ODP2) (see, e.g, U.S. Pat. No. 7,579,529), recombinases such as FLP or Cre having modified codon usage (moFLP, moCre) (see, e.g., U.S. Pat. No. 6,720,475, U.S. Pat. No. 6,262,341). Other elements include recombination sites such as FRT sites, or lox sites, wherein FRT1 refers to a wild type minimal FRT site, loxP refers to a wild type minimal lox site, and other nomenclatures refer to non-wild type minimal sites. The abbreviations RB and LB refer respectively to right border and left border sequences from an Agrobacterium T-DNA.

### A. Ethametsulfuron-Inducible Callus Initiation in Maize

[0224] Immature maize embryos from maize inbred PHN46 were transformed as describe in Example 5D using Agrobacterium comprising the following:
[0225] RB-BSV(AY) PRO::tetOp::Adh1 Intron::ODP2::pinII+35S ENH::ALS PRO::HRA::pinII+Ubi Pro::ESR(3E3)::pinII-LB.

[0226] Events were selected on 100 μg/l chlorsulfuron, and plantlets were regenerated in the absence of the SU compound. When the plantlets were approximately 20 cm tall, the leaves were cut into approximately 2-4 mm cross-sections and placed on embryogenic culture medium+/−100 mg/L chlorsulfuron. Over the next two weeks, leaf pieces on the control medium (no SU) became necrotic and died, but leaf pieces on the chlorsulfuron-containing medium were producing callus from the leaf segments.

### B. Ethametsulfuron-induced Recombination in Maize

### 1. Excision

[0227] Expression of a polynucleotide of interest may be controlled by inducing excision of an intervening fragment to produce or improve a functional linkage to expression control elements.

[0228] Maize immature embryos and mature embryo-derived rice callus were transformed as described above. Each was co-transformed with Agrobacterium LBA4404 containing the following two T-DNAs, each on a separate plasmid:
[0229] RB-35S PRO:tetOp::Adh intron::moCRE::pinII+35S PRO::Adh intron::ESR (L13-2-23)::Ubi14 TERM+UBI PRO::Ubi intron::moPAT::pinII-LB
[0230] RB-Ubi Pro::SbALS::pinII+Ubi Pro:loxP:AmCYAN::pinII−loxP:ZsYELLOW::pinII-LB

[0231] After Agrobacterium transformation, transgenic events were selected on media containing 3 mg/L bialaphos. Herbicide-resistant, blue fluorescent co-transformed calli were recovered and tested for SU-inducible excision. Calli were split onto media+/−250 μg/L ethametsulfuron. For both rice and maize, after one week the calli in the control (no SU) continued to express only the AmCYAN (blue fluorescence), while calli grown in the presence of 250 μg/L ethametsulfuron, yellow fluorescent sectors were observed, indicating excision of AmCYAN and activation of ZsYELLOW expression.

### 2. Inversion

[0232] Recombination sites with unequal activity between forward and reverse reactions can be used to stably trigger a chemical switch. Examples of such recombination sites are available, for example see Albert et al. (1995) Plant J 7:649-659 (herein incorporated by reference).

[0233] Maize immature embryos are co-transformed with Agrobacterium LBA4404 containing the following 2 T-DNAs, each on a separate plasmid:
[0234] RB-35S PRO:tetOp::Adh intron::moCRE::pinII+35S PRO::Adh intron::ESR (L13-2-23)::Ubi14 TERM+UBI PRO::Ubi intron::moPAT::pinI-LB
[0235] RB-Ubi Pro::SbALS::pinII+Ubi Pro:lox66:AmCYAN::pinII+pinII (Reverse)::ZsYELLOW (Reverse)::lox71(Reverse)-LB

[0236] After transformation, transgenic events are selected on media containing 3 mg/L bialaphos. Herbicide-resistant, blue fluorescent co-transformed calli are recovered and tested for SU-inducible inversion. Calli are split onto medium+/−250 μg/L ethametsulfuron. After one week, the calli on control media (no SU) should continue to express only the AmCYAN (blue fluorescence), while in calli grown in the presence of 250 μg/L ethametsulfuron, should having sectors exhibiting only yellow fluorescent, indicating inversion and activation of ZsYELLOW expression.

### 3. Site-Specific Integration

[0237] Maize immature embryos are transformed with Agrobacterium LBA4404 containing the following FLP construct:
[0238] RB-35S PRO:tetOp::Adh intron::moFLP::pinII+35S PRO::Adh intron::ESR (L13-2-23)::Ubi14 TERM+Ubi Pro::SbALS::pinII+loxP-Rab17PRO::moCRE::pinII+UBI PRO::Ubi intron::moPAT::pinII−loxP-LB

[0239] Callus events are selected on standard maize embryogenic medium+3 mg/L bialaphos for 8 weeks, at which point the calli are transferred onto dry filter paper for 2-3 days to induce Cre recombinase expression and excision of both the Cre and moPAT expression cassettes from the transgenic locus. After desiccation-induced excision of the selectable marker, the callus is moved onto maturation and regeneration media without bialaphos. Regenerated plants are self-pollinated and progeny are analyzed to recover homozygous transgenic events.

[0240] T1 progeny containing the two copies of the FLP construct locus are crossed to plants that are homozygous for the SSI target:
[0241] RB-Ubi Pro:FRT1:AmCYAN::pinII+Ubi Pro:GAT::pinII-FRT6-LB.

[0242] The resultant progeny contain one copy of the inducible FLP recombinase and one copy of the target site. Immature embryos are isolated when they are 1.2 mm in length, and cultured for 3 days on 250 ppb ethametsulfuron. After 3 days of induced moFLP expression, the embryos are moved to high osmotic medium (560M) and bombarded with the donor vector containing FRT1::moPAT::pinII+Ubi Pro:YFP::pinII-FRT6.

[0243] After bombardment, embryos are cultured for an additional week on 560P medium+250 ppb ethametsulfuron with no herbicide selection. Upon introduction, FLP recombinase facilitates the replacement of CFP::pinII+Ubi Pro:GAT::pinII with moPAT::pinII+Ubi Pro:YFP::pinII, changing the callus phenotype from {CFP+,GAT+} to {YFP+,PAT+}. One week after bombardment, embryos are removed from the SU medium and placed on medium+3 mg/L bialaphos. Bialaphos-resistant, yellow fluorescent site-specific integration events are recovered and fertile maize plants regenerated.

### C. Inducible Gene Silencing in Soybean

[0244] Any transformation protocols, culture techniques, soybean source, and media, and molecular cloning techniques can be used with the compositions and methods.

[0245] Plasmids are made using standard procedures and from these plasmids DNA fragments are isolated using restriction endonucleases and agarose gel purification. Each DNA fragment will contain five cassettes:
[0246] Cassette 1 contains sequence encoding a maize optimized Cre recombinase (see, e.g., U.S. Pat. No. 6,262,341, herein incorporated by reference) under the control of a 35S cauliflower mosaic virus promoter having three tet operators introduced near the TATA box (Gatz et al. (1992) Plant J 2:397-404 (3XOpT 35S));
[0247] Cassette 2 contains the sequence encoding a silencing construct, in this case an artificial miRNA comprising a soybean microRNA159 backbone and a FAD2-1b miRNA (see US2009/0155910, herein incorporated by reference) under the control of a mirabilis mosaic virus (MMV) promoter. Cassette 3 is inserted between the promoter and the silencing construct of Cassette 2;
[0248] Cassette 3 comprises a hygromycin resistance gene under the control of a 35S cauliflower mosaic virus promoter and flanked by LOXP sites;
[0249] Cassette 4 is the repressor expression cassette; and,
[0250] Cassette 5 is an expression cassette providing an HRA gene.
[0251] Cassette 4 and Cassette 5 are equivalent to Cassette 2 and Cassette 3 respectively and described in Example 5C. The sequence of the entire DNA fragment is given in SEQ ID NO:847.

[0252] DNA fragments will be used for soybean transformation as described in Example 5C above. Plants will be regenerated and seeds collected. These seeds will be treated with ethametsulfuron and planted. T2 seeds will be collected and assayed for fatty acid levels using standard GC-mass spectrometry methods. It is expected that the treatment with ethametsulfuron will cause induction of the Cre recombinase which will excise cassette 3. This then allows the expression of cassette 2 and the silencing of the gene of interest. In this case the gene of interest is the fatty acid desaturase 2-1 and silencing causes an increase in the amount of oleic acid (18:1) that accumulates in the seed.

[0253] It is understood by those well versed in the art that the 159-FAD2-1b artificial microRNA can be substituted by any polynucleotide of interest that directs gene silencing. This includes but is not limited to artificial microRNAs, RNAi constructs, siRNA constructs, sense silencing constructs, antisense silencing constructs, constructs that cause the production of double stranded-RNA, ribozymes, and engineered RnaseP constructs. Furthermore the promoter driving cassette 2, or another cassette, can be constitutive (as shown here) or can be a tissue-preferred, a developmental stage-preferred promoter, an inducible promoter or a repressible promoter. For example, an embryo-preferred promoter such as a soybean conglycinin promoter could be used in cassette 2.

### Example 7

### Plant Promoters Containing Tet Operators

[0254] Several plant promoters were evaluated and engineered to contain tet operator sequences. Generally, three copies of a tet operator sequence (SEQ ID NO:848) were placed into the promoter. The placement of the operator sequences was essentially modeled based on the 355-TripleOp promoter used extensively in plants (Gatz et al. (1992) Plant J 2:397). However, alternative configurations are possible, including the number, placement, and/or sequence of tet operators used to design ligand-regulated promoters, which can be varied based on function, promoter type, promoter sequence, promoter conservation, species, and other criteria (see, e.g., Berens & Hillen (2003) Eur J Biochem 270:3109; Gatz & Quail (1998) PNAS 85:1394-1397; Gatz et al. (1991) Mol Gen Genet 227:229-237; Frohberg et al. (1991) PNAS 88:10470-10474).

[0255] Selected promoters were evaluated by analyzing one or more related candidate promoters to identify any conserved regions, and to locate motifs including TATA-box, Y-patches, and transcriptional start site(s) (TSS). In some examples, one or more of these motifs could not be unambiguously identified. The objective was to incorporate the tet operator sequences for maximal predicted function, while minimizing disruptions to sequence, conserved regions, motifs, and spacing between motifs and/or conserved regions. Two operator sequences were incorporated flanking the predicted TATA box, and the third operator is near or overlapping with the transcription start site. The final location and spacing of the operators depends on the promoter sequence and motifs. When possible, operator sequences are placed to minimize changes, and therefore will be sequence replacements rather than insertions. After designing the placement of operators into the promoter, the resulting sequences were re-analyzed to confirm that the original promoter motifs are predicted by the analysis methods and algorithms.

[0256] Generally, tet operator sequences were placed within a few nucleotides of either side of the TATA box, and in some cases there was a short overlap with the TATA box sequence or the transcription start site (TSS). A third operator was placed downstream from the second operator near the transcription start site. The third operator was typically downstream of the TSS, and in some instances had some overlap with the TSS sequence. Activity from these promoters can be controlled using any tetracycline compound/tetracycline repressor system, and/or using any sulfonylurea compound/sulfonylurea repressor system.

[0257] Mirabilis mosaic virus (MMV) promoters with single (SEQ ID NO:851) and double enhancer domains (dMMV) (SEQ ID NO:852) (Dey & Maiti (1999) Plant Mol Biol 40:771-782; Dey & Maiti (1999) Transgenics 3:61-70) were analyzed to identified conserved sequence regions and putative motifs. These promoter sequences were modified as generally described above to avoid disrupting any conserved region or motif and to include three copies of tet operator (SEQ ID NO:848) to produce regulated promoters MMV::tetOp (SEQ ID NO:857) and dMMV::tetOp (SEQ ID NO:858). The promoter design is shown in FIG. 2A. The second tet operator has a small overlap with the predicted transcription start site (TSS). Activity from these promoters can be controlled using any tetracycline compound/tetracycline repressor system, and/or using any sulfonylurea compound/sulfonylurea repressor system.

[0258] Banana streak virus Acuminata Yunan (BSV(AY)) promoter (SEQ ID NO:850) was analyzed with six other BSV isolate promoter sequences in order to identify conserved sequence regions and putative motifs. The analysis identified several conserved regions, and putative TATA box, TSS, and Y-patches. BSV(AY) promoter sequence was modified as generally described above to include three copies of tet operator (SEQ ID NO:848) to produce a regulated promoter BSV::tetOp (SEQ ID NO:856). The designed sequence was re-analyzed regarding the predicted TATA box and TSS.

[0259] An EF1A2 promoter from Glycine max (SEQ ID NO:854) was analyzed with another soybean, two Arabidopsis, and two Medicago EF1A promoter sequences to identify conserved sequence regions and motifs. Based on this analysis, placement of three copies of tet operator (SEQ ID NO:848) was designed to produce regulated promoter EF1A2::tetOp (SEQ ID NO:860). The designed promoter was re-analyzed to confirm retention of the previously identified TATA box and TSS. The promoter design is shown in FIG. 2A.

[0260] An Oryza sativa actin promoter (SEQ ID NO:849) was analyzed with an actin promoter from Zea mays and one from Sorghum bicolor. Based on this analysis, placement of three copies of tet operator (SEQ ID NO:848) was designed to produce regulated promoter OsActin::tetOp (SEQ ID NO:855). The designed promoter was re-analyzed regarding previously identified motifs including the TATA box and the TSS.

[0261] MPSS data and EST distribution were used to develop a short-list of promoters that appeared to be expressed in the maize meristem and were not active in callus. MPSS data identified 92 potential meristem-specific genes. Seven of these had putative TATA boxes within their promoters. Two of the seven were represented by EST's, only one of which had a well-defined TATA box. This promoter, which drives expression of a maize p450 gene, was designated MP1 (SEQ ID NO:853). The full length maize, sorghum and rice MP1 promoters were analyzed as described above in order to identify conserved sequences, motifs, TATA box, and transcription start site. Three copies of tet operator sequence (SEQ ID NO:848) were positioned flanking the TATA box and just downstream of the transcription start site, taking care to avoid conserved motifs to produce regulated promoter MP1:tetOp (SEQ ID NO:859). The designed promoter was re-analyzed to confirm retention of the previously identified TATA box and TSS.

[0262] The activity of unmodified and designed MMV, dMMV, and EF1A2 promoters were evaluated using the characterized 35SCaMV (SEQ ID NO:861) and 35SCaMV::tetOP (SEQ ID NO:862) promoters as controls. Promoter activity was analyzed via Agrobacterium-mediated transient expression analysis in Nicotiana benthamiana leaves. N. benthamiana leaves were infected with luciferase reporter constructs controlled by either the modified or unmodified promoters. Test constructs were identical except for the promoter sequence (Pro) being tested. Test constructs comprised the following operably linked components:
[0263] RB-Pro-RLuc-UBQ3-EF1A-NptII-EF1A3′-LB

[0264] Relative light units were quantified for modified and unmodified promoters (FIG. 3), and promoter activity for the modified version determined as the percent of unmodified promoter activity (ProOp/Pro). The results show that all modified promoters are still active but do suffer some reduction in activity as a result of the added tet operator sequences. In this assay, 35S:tetOp had about 25% of the activity as 35S promoter, EF1A2:tetOp had about 30% of the activity of EF1A2 promoter, MMV:tetOp had about 60% of the activity of MMV promoter, and dMMV:tetOp had about 50% of the activity of dMMV promoter.

[0265] Sulfonylurea compound/SuR regulation of these same promoters was analyze by co-infecting N. benthamiana leaves with the above test constructs and with an Agrobacterium strain comprising a sulfonylurea repressor expression construct (pVER7555):
[0266] RB-dMMV-SuR-UBQ14-EF1A-NptII-ScCAL1 3′-LB

[0267] or a control construct (pVER7549):
[0268] RB-dPCSV-FLuc-UBQ3-EF1A-NptII-EF1A3′-LB

[0269] Repression and de-repression were tested with control (H₂O) and sulfonylurea ligand (ethametsulfuron, Es). The data demonstrate that all promoters, including the control 35S::tetO promoter, are repressed and de-repressed to a similar degree (FIG. 4).

[0270] The BSV::tetOp promoter and the MP1::tetOp promoter were synthesized and cloned into expression cassettes driving expression of the DsRED (RFP) gene for testing. For all comparisons of RFP expression, side-by-side comparisons were made within experiment by taking micrographs of the tissue at the same exposure and qualitatively ranking fluorescence intensity, assigning the scores in the table below. The DsRED protein is very stable (has a relatively long half-life), and even with low expression levels in the cell can accumulate over time. Thus, when no fluorescence or low levels of fluorescence were observed in the absence of ligand, this likely represented a transgenic event with relatively stringent repression.

| Score | Description |
|---|---|
| 0 | no fluorescence |
| 1 | faint fluorescence |
| 2 | medium intensity |
| 3 | strong fluorescence |
| 4 | very bright fluorescence |

[0271] Maize immature embryos were transformed with Agrobacterium as generally described in Example 5D. Transformants were generated that contained one of the two T-DNAs shown below:
[0272] RB-BSV:tetOp::Adh Intron::dsRed+ALS:HRA+Ubi:ESR(3E3)-LB
[0273] RB-35S:tetOp::Adh intron::dsRed+ALS:HRA+Ubi::ESR(3E3)-LB

[0274] Selection of transgenic events was performed using 30, 100, or 500 μg/L chlorsulfuron. Chlorsulfuron is generally a less active inducer of the ethametsulfuron repressor, having approximately 10-fold less activity. After six weeks on these three different levels of chlorsulfuron, very low levels of inducible RFP was observed in the 30 μg/l treatment (Score=0. In the 100 μg/l treatment small sectors of RFP fluorescence were observed, and although the brightness of the fluorescence was stronger than for the 30 μg/L treatment, it was still relatively weak. In the 500 μg/l treatment, large segments of the calli were brightly fluorescing. Thus, with increasing concentrations of ligand during cell culture, a corresponding increase in RFP de-repression was observed.

### Example 8

### Auto-Regulation of Gene Switch

[0275] Any combination of gene switch elements can be used, including but not limited to one or more of the sulfonylurea-responsive repressors, tetracycline-responsive repressors, or tetracycline operator-containing promoters provided.

[0276] To determine if auto-regulation would enhance ligand-induced plant gene expression, transformation vectors for comparing regulation of dsRED from auto-regulated or constitutively expressed EsR (L13-23) were constructed and tested in transient expression assays. The standard vector, pVER7385 (35SOp-dsRED-UBQ3/35S-EsR(L13-23)-UBQ14/SAMS-HRA), expresses dsRED from the 35SOp promoter and the repressor from a constitutive 35S promoter. The auto-regulated test vector, pVER7384, is essentially the same as pVER7385 except that both dsRED and EsR are controlled by the same 35SOp promoter. A second auto-regulated test vector, pVER7374, differs from pVER7384 in that the regulated MMV::Op promoter described in Example 7 was used in place of the 35SOp promoter (FIG. 6). An additional control vector, pVER7578 (35SOp-dsRED-UBQ3/dMMV-EsR(L7-A11)-UBQ14/SAMS-HRA), was included and was previously shown to deliver inducible dsRED expression in N. benthamiana leaves. This vector differs from pVER7385 in that the strong dMMV promoter drives expression of repressor L7-A11. Construction of all vectors was performed using standard cloning techniques. Each vector was transformed into Agrobacterium tumefaciens AGL1 and then subjected to transient expression analysis in N. benthamiana by forced leaf infiltration. For each sample, the test strain was mixed in an 80:20 ratio with a strain bearing a constitutive ZsGREEN vector used to normalize expression. Each sample was infiltrated once per half leaf, repeated on each half of the leaf, and the same pattern repeated on a separate leaf. Following 2 days co-cultivation, leaves were excised from the plant, cut down the vein line and the cut edge placed into either H₂O or 1 ppm Ethametsulfuron for two days. All samples were exposed in parallel to water or inducer treatments and repeated once. Following treatment the leaves were imaged for dsRED and zsGREEN expression using a Typhoon Laser Scanner (GE Healthcare, Piscataway, N.J.). DsRED (BD Sciences, Clontech) expression was quantified using an excitation wavelength of 532 nm and an emission wavelength of 580 nM. ZsGREEN (BD Sciences, Clontech) expression was quantified using an excitation wavelength of 488 nm and an emission wavelength of 520 nm. The data show induction of dsRED is more robust from vectors expressing an auto-regulated repressor (FIG. 7). The data also show that it is not essential to have the same promoter regulating both dsRED and the repressor to achieve enhanced induction.

[0277] A second transient assay was performed by vacuum infiltration of test Agrobacterium cultures into the first true leaves of Phaseolus vulgaris. This was done by submerging the entire leaf bearing section of the plant into beakers of test culture composed of a 50:50 mix of the test strain with a strain bearing a constitutive ZsGREEN vector used to normalize expression. In this experiment the test was limited to vectors pVER7384, pVER7385, and pVER7578. The results show that the auto-regulated construct pVER7384 is induced better than for either of the two standard vectors (FIG. 8). ZsGREEN expression patterns of the same leaf samples indicate that this effect cannot be accounted for by variance in overall expression competency of the infiltrated leaf. In addition, the results demonstrate that the effect of auto-regulation on ligand-induced plant gene expression is not unique to one test plant system and is likely to be universal for all plant expression hosts.

[0278] To establish that this phenomenon also applied to transgenic plants, tobacco was transformed with test vectors and plant leaf tissue was analyzed for sensitivity to inducer. Plasmids pVER7384 and pVER7385 described above were used to test auto-regulation vs. constitutive repressor expression using the same shuffled repressor variant: EsR(L13-23). Plasmids pHD1119, pHD1120, and pHD1121 are essentially the same as pVER7384 except they encode shuffled repressor variants EsR(L15-1), EsR(L15-20) and EsR(L15-36). Construction of all vectors was performed using standard cloning techniques. All vectors were transformed into disarmed Agrobacterium tumefaciens EHA105 and each new strain subsequently used to co-cultivate 64 leaf explants of Nicotiana tabacum ‘Petite Havana’. Following co-cultivation the tissues were placed on medium with 50 ppb imazapyr to select for the presence of the linked ‘SAMS-HRA’ gene which encodes an allele of acetolactate synthase that is cross resistant to both sulfonylurea and imidizolinone herbicides. Imazapyr was used as the selective agent instead of sulfonylurea compounds since this herbicide will not induce the switch yet still act as a selective agent. Transformed shoots arising from each co-cultivation experiment are analyzed for their level of leaky dsRED expression. Only those lines with no (or minimal) leaky dsRED expression were carried forward for induction analysis. Leaf disks from each event (except for those arising from pVER7385) were placed on 0, 5, 10, 25, and 50 ppb ethametsulfuron (Es) and incubated in the light at 25° C. Leaf disks arising from transformed events from the pVER7385 co-cultivation were placed on 0 and 50 ppb ethametsulfuron and incubated in parallel with the other samples. After 24 hours of incubation, the leaf disks were imaged and scored for relative dsRED expression. As demonstrated in FIG. 9, none of the pVER7385 (repressor not auto-regulated) leaf pieces express significant dsRED activity at 50 ppb Es whereas all the samples arising from an auto-regulated repressor showed some degree of derepression, starting at as little as 5 ppb inducer and some intensely expressing at just 10 ppb Es. The results demonstrate that the effects of auto-regulation on ligand-induced plant gene expression are reproducible in transgenic plants.

[0279] The articles “a” and “an” refer to one or more than one of the grammatical object of the article. By way of example, “an element” means one or more of the element. All book, journal, patent publications and grants mentioned in the specification are indicative of the level of those skilled in the art. All publications and patent applications are herein incorporated by reference to the same extent as if each individual publication or patent application was specifically and individually indicated to be incorporated by reference. Although the foregoing invention has been described in some detail by way of illustration and example for purposes of clarity of understanding, certain changes and modifications may be practiced within the scope of the appended claims. These examples and descriptions are illustrative and are not read as limiting the scope of the appended claims.

What is claimed:

1. A method to regulate expression in a plant cell contained in a plant or in a seed comprising:
(a) providing the plant cell comprising a sulfonylurea-regulated gene switch which controls expression of a polynucleotide of interest, wherein said plant cell is a sulfonylurea tolerant plant cell; and;
(b) providing a sulfonylurea compound which regulates the gene switch wherein the sulfonylurea compound is provided by foliar application, root drench application, pre-emergence application, post-emergence application, or seed treatment application.

2. The method of claim 1, wherein expression of the polynucleotide of interest alters the phenotype of the plant cell.

3. The method of claim 1, wherein expression of the polynucleotide of interest alters the genotype of the plant cell.

4. The method of claim 1, wherein providing the sulfonylurea compound activates expression of the polynucleotide of interest.

5. The method of claim 1, wherein the plant cell is from a monocot or a dicot.

6. The method of claim 5, wherein the plant cell is from maize, rice, sorghum, sugarcane, barley, oat, wheat, turfgrass, soybean, canola, cotton, tobacco, sunflower, safflower, or alfalfa.

7. The method of claim 1, wherein the sulfonylurea-regulated gene switch comprises a repressible promoter operably linked to a polynucleotide of interest, wherein the repressible promoter comprises a tet operator.

8. The method of claim 1, wherein the sulfonylurea-regulated gene switch comprises a repressible promoter selected from the group consisting of SEQ ID NO:855, 856, 857, 858, 859, and 860, or a repressible promoter having at least 95% sequence identity to SEQ ID NO:855, 856, 857, 858, 859, 860 or 862.

9. The method of claim 1, wherein the sulfonylurea compound comprises a pyrimidinylsulfonylurea compound, a triazinylsulfonylurea compound, or a thiadazolylurea compound.

10. The method of claim 9, wherein the sulfonylurea compound comprises a chlorosulfuron, an ethametsulfuron, a thifensulfuron, a metsulfuron, a sulfometuron, a tribenuron, a chlorimuron, a nicosulfuron, or a rimsulfuron.

11. The method of claim 1, wherein the polynucleotide of interest encodes a polypeptide that specifically binds to a target nucleic acid sequence.

12. The method of claim 11, wherein the polypeptide is a recombinase, an integrase, a nuclease, a homing endonuclease, or a zinc-finger nuclease.

13. The method of claim 1, wherein the sulfonylurea-regulated gene switch comprises a sulfonylurea-responsive repressor comprising an amino acid sequence of any one of SEQ ID NOs:3-419, or an amino acid sequence having at least 85% sequence identity to any one of SEQ ID NOs:3-419.

14. A sulfonylurea-regulated gene switch which controls expression of a polynucleotide of interest, wherein the polynucleotide of interest encodes a polypeptide that specifically binds a DNA sequence or encodes a polypeptide that cuts a DNA sequence.

15. The sulfonylurea-regulated gene switch of claim 14, wherein the encoded polypeptide is a recombinase, an integrase, a nuclease, a homing endonuclease, or a zinc-finger nuclease.

16. The sulfonylurea-regulated gene switch of claim 14, wherein the sulfonylurea gene switch comprises a sulfonylurea responsive repressor, wherein the sulfonylurea responsive repressor is operably linked to a promoter active in the plant wherein the promoter is a constitutive promoter, a tissue-preferred promoter, a developmental stage-preferred promoter, an inducible promoter, or a repressible promoter.

17. The sulfonylurea-regulated gene switch of claim 16, wherein
(a) the constitutive promoter is a MTH promoter, an EF1a promoter, a PIP promoter, a ubiquitin promoter, an actin promoter, or a 35S CaMV promoter;
(b) the tissue-preferred promoter is a meristem-preferred promoter, an embryo-preferred promoter, a leaf-preferred promoter, a root-preferred promoter, an anther-preferred promoter, a pollen-preferred promoter, or a floral-preferred promoter;
(c) the developmental stage-preferred promoter is an early embryo promoter, a late embryo promoter, a germination-preferred promoter, or a senescence-preferred promoter;
(d) the inducible promoter is a chemical inducible promoter, a pathogen inducible promoter, a heat-stress promoter, a drought-stress promoter, a light inducible promoter, an osmoticum inducible promoter, or a metal inducible promoter; or,
(e) the repressible promoter is a tetracycline-repressible promoter, or a lactose-repressible promoter.

18. The sulfonylurea-regulated gene switch of claim 16, wherein the polynucleotide of interest or said sulfonylurea-responsive repressor is operably linked to a repressible promoter comprising at least one tetracycline operator sequence.

19. The sulfonylurea-regulated gene switch of claim 18, wherein the repressible promoter is a constitutive promoter, a tissue-preferred promoter, or a development stage-preferred promoter.

20. The sulfonylurea-regulated gene switch of claim 19, wherein the repressible promoter is a 35S CaMV promoter, an actin promoter, an EF1A promoter, an MMV promoter, a dMMV promoter, a MP1 promoter, or a BSV promoter.

21. The sulfonylurea regulated gene switch of claim 20, wherein the repressible promoter comprises a polynucleotide sequence as set forth in SEQ ID NO:855, 856, 857, 858, 859, 860 or 862, or a polynucleotide sequence having at least 95% sequence identity to SEQ ID NO:855, 856, 857, 858, 859, 860 or 862.

22. The sulfonylurea regulated gene switch of claim 16, wherein the sulfonylurea-responsive repressor comprises an amino acid sequence of any one of SEQ ID NOs:3-419, or an amino acid sequence having at least 85% sequence identity to any one of SEQ ID NOs:3-419.

23. A transgenic plant, a transgenic plant cell, or a transgenic seed comprising the sulfonylurea regulated gene switch of claim 14.

24. The transgenic plant, the transgenic plant cell, or the transgenic seed of claim 23, wherein the transgenic plant, the transgenic plant cell, or the transgenic seed is from a monocot or a dicot.

25. The transgenic plant, the transgenic plant cell, or the transgenic seed of claim 24, wherein the monocot or dicot is from maize, rice, sorghum, sugarcane, barley, oat, wheat, turfgrass, soybean, canola, cotton, tobacco, sunflower, safflower, or alfalfa.

26. A recombinant polynucleotide comprising a repressible promoter, wherein the repressible promoter is active in a plant cell, and the repressible promoter comprises an actin promoter, an EF1A promoter, an MMV promoter, a dMMV promoter, an MP1 promoter, or a BSV promoter operably linked to at least one operator sequence.

27. The recombinant polynucleotide of claim 26, wherein the repressible promoter comprises a polynucleotide sequence as set forth in SEQ ID NO:855, 856, 857, 858, 859, 860 or 862 or a polynucleotide sequence having at least 95% sequence identity to SEQ ID NO:855, 856, 857, 858, 859, 860 or 862.

28. A method to regulate expression in a cell comprising:
(a) providing the cell comprising a regulated gene switch which controls expression of a polynucleotide of interest, wherein the gene switch comprises a repressible promoter of claim 26; and;
(b) providing a ligand compound which regulates the gene switch, wherein ligand compound comprises a tetracycline, a sulfonylurea, or any analogs thereof.

29. A recombinant polynucleotide comprising a repressible promoter operably linked to a polynucleotide encoding a sulfonylurea-responsive repressor.

30. The recombinant polynucleotide of claim 29, wherein the encoded sulfonylurea-responsive repressor comprises an amino acid sequence of any one of SEQ ID NOs:3-419 or an amino acid sequence having at least 85% sequence identity to any one of SEQ ID NOs:3-419.

31. The recombinant polynucleotide of claim 29, wherein the repressible promoter is an actin promoter, an MMV promoter, a dMMV promoter, an MP1 promoter, or a BSV promoter operably linked to at least one operator sequence.

32. The recombinant polynucleotide of claim 31, wherein the repressible promoter comprises a polynucleotide sequence as set forth in SEQ ID NO:855, 856, 857, 858, 859, 860 or 862, or a polynucleotide sequence having at least 95% sequence identity to SEQ ID NO:855, 856, 857, 858, 859, 860 or 862.

The application's sequence listing, which the Patent Office published only in electronic form, follows.

SEQUENCE LISTING (866 sequences)

SEQ ID NO: 1 - protein, 207 aa, Escherichia coli
MSRLDKSKVINSALELLNEVGIEGLTTRKLAQKLGVEQPTLYWHVKNKRALLDALAIEMLDRHHTHFCPLEGESWQDFLRNNAKSFRCALLSHRDGAKVHLGTRPTEKQYETLENQLAFLCQQGFSLENALYALSAVGHFTLGCVLEDQEHQVAKEERETPTTDSMPPLLRQAIELFDHQGAEPAFLFGLELIICGLEKQLKCESGS

SEQ ID NO: 2 - protein, 208 aa, Artificial Sequence
  WT TetR with Gly insertion at position 2
MGSRLDKSKVINSALELLNEVGIEGLTTRKLAQKLGVEQPTLYWHVKNKRALLDALAIEMLDRHHTHFCPLEGESWQDFLRNNAKSFRCALLSHRDGAKVHLGTRPTEKQYETLENQLAFLCQQGFSLENALYALSAVGHFTLGCVLEDQEHQVAKEERETPTTDSMPPLLRQAIELFDHQGAEPAFLFGLELIICGLEKQLKCESGS

SEQ ID NO: 3 - protein, 208 aa, Artificial Sequence
  Sulfonylurea responsive repressor L1-02
MGSRLDKSKVINSALELLNEVGIEGLTTRKLAQKLGVEQPTLYWHVKNKRALLDALAIEMLDRHATHFCPLEGESWQDFLRNNAKSFRCALLSHRDGAKVCLGTAVTEKQYETMENILAFLCQQGFSLENALYARRAVIAFTLGCVLWDQEYQVAKEERETPTTDSMPPLLRQARELIDHQGAEPAFLFGLELIICGLEKQLKCESGS

SEQ ID NO: 4 - protein, 208 aa, Artificial Sequence
  Sulfonylurea responsive repressor L1-07
MGSRLDKSKVINSALELLNEVGIEGLTTRKLAQKLGVEQPTLYWHVKNKRALLDALAIEMLDRHNTHFCPLEGESWQDFLRNNAKSWRCALLSHRDGAKVVLGTAITEKQYETHENPLAFLCQQGFSLENALYAIAAVRRFTLGCVLVDQERQVAKEERETPTTDSMPPLLRQASELQDHQGAEPAFLFGLELIICGLEKQLKCERGS

SEQ ID NO: 5 - protein, 208 aa, Artificial Sequence
  Sulfonylurea responsive repressor L1-09
MGSRLDKSKVINSALELLNEVGIEGLTTRKLAQKLGVEQPTLYWHVKNKRALLDALAIEMLDRHATHFCPLEGESWQDFLRNNAKSMRCALLSHRDGAKVCLGTGFTEKQYETAENSLAFLCQQGFSLENALYAMQAVCIFTLGCVLLDQELQVAKEERETPTTDSMPPLLRQALELKDHQGAEPAFLFGLELIICGLEKQLKCESGS

SEQ ID NO: 6 - protein, 208 aa, Artificial Sequence
  Sulfonylurea responsive repressor L1-20
MGSRLDKSKVINSALELLNEVGIEGLTTRKLAQKLGVEQPTLYWHVKNKRALLDALAIEMMDRHQTHFCPLEGESWQDFLRNNAKSMRCALLSHRDGAKVFLGTAWTEKQYETVENLLAFLCQQGFSLENALYALNAVATFTLGCVLWDQEKQVAKEERETPTTDSMPPLLRQAHELGDHQGAEPAFLFGLELIICGLEKQLKSESGS

SEQ ID NO: 7 - protein, 208 aa, Artificial Sequence
  Sulfornylurea responsive repressor L1-22
MGSRLDKSKVINSALELLNEVGIEGLTTRKLAQKLGVEQPTLYWHVKNKRALLDALAIEMMDRHHTHFCPLEGESWQDFLRNTAKSYRCALLSHRDGAKVCLGTAITEKQYETKENNLAFLCQQGFSLENALYARQAVRVFTLGCVLFDQEMQVAKEERETPTTDSMPPLLRQASELLDHQGAEPAFLFGLELIICGLEKQLKSESGS

SEQ ID NO: 8 - protein, 208 aa, Artificial Sequence
  Sulfonylurea responsive repressor L1-24
MGSRLDKSKVINSALELLNEVGIEGLTTRKLAQKLGVEQPTLYWHVKNKRALLDALAIEMLDRHNTHFCPLEGESWQDFLRNSAKSMRCALLSHRDGAKVLLGTAVTEKQYETTENSLAFLCQQGFSLENALYAIRAVRTFTLGCVLVDQERQVAKEERETPTTDSMPPLLRQAKELLDHQGAEPAFLFGLELIICGLEKQLKCESGS

SEQ ID NO: 9 - protein, 208 aa, Artificial Sequence
  Sulfonylurea responsive repressor L1-28
MGSRLDKSKVINSALELLNEVGIEGLTTRKLAQKLGVEQPTLYWHVKNKRALLDALAIEMLDRHATHFCPLEGESWQDFLRNNAKSMRCALLSHRDGAKVWLGTAWTEKQYETPENVLAFLCQQGFSLENALYASRAVVTFTLGCVLTDQEKQVAKEERETPTTDSMPPLLRQAWELLDHQGAEPAFLFGLELIICGLEKQLKCESGS

SEQ ID NO: 10 - protein, 208 aa, Artificial Sequence
  Sulfonylurea responsive repressor L1-29
MGSRLDKSKVINSALELLNEVGIEGLTTRKLAQKLGVEQPTLYWHVKNKRALLDALAIEMMDRHQTHFCPLEGESWQDFLRNTAKSMRCALLSHRDGAKVWLGTRWTEKQYETPENMLAFLCQQGFSLENALYAWSAVCNFTLGCVLSDQERQVAKEERETPTTDSMPPLLRQAWELSDHQGAEPAFLFGLELIICGLEKQLKCESGS

SEQ ID NO: 11 - protein, 208 aa, Artificial Sequence
  Sulfonylurea responsive repressor L1-31
MGSRLDKSKVINSALELLNEVGIEGLTTRKLAQKLGVEQPTLYWHVKNKRALLDALAIEMLDRHATHFCPLEGESWQDFLRNNAKSMRCALLSHRDGAKVMLGTRATEKQYETVENRLAFLCQQGFSLENALYAVRAVHWFTLGCVLIDQEMQVAKEERETPTTDSMPPLLRQAYELYDHQGAEPAFLFGLELIICGLEKQLKCESGS

SEQ ID NO: 12 - protein, 208 aa, Artificial Sequence
  Sulfonylurea responsive repressor L1-38
MGSRLDKSKVINSALELLNEVGIEGLTTRKLAQKLGVEQPTLYWHVKNKRALLDALAIEMADRHHTHFCPLEGESWQDFLRNNAKSMRCALLSHRDGAKVWLGTAWTEKQYETTENMLAFLCQQGFSLENALYAWRAVTMFTLGCVLRDQEWQVAKEERETPTTDSMPPLLRQALELGDHQGAEPAFLFGLELIICGLEKQLKCESGS

SEQ ID NO: 13 - protein, 208 aa, Artificial Sequence
  Sulfonylurea responsive repressor L1-44
MGSRLDKSKVINSALELLNEVGIEGLTTRKLAQKLGVEQPTLYWHVKNKRALLDALAIEMLDRHATHFCPLEGESWQDFLRNNAKSYRCALLSHRDGAKVYLGTAVTEKQYETAENQLAFLCQQGFSLENALYAVKAVAGFTLGCVLWDQESQVAKEERETPTTASMPPLLRQAVELADHQGAEPAFLFGLELIICGLEKQLKCESGS

SEQ ID NO: 14 - protein, 208 aa, Artificial Sequence
  Sulfonylurea responsive repressor L6-1B03
MGSRLDKSKVINSALELLNEVGIEGLTTRKLAQKLGVEQPTLYWHVKNKRALLDALAIEMMDRHATHICPLEGESWQDFLRNNAKSMRCALLSHRDGAKVCLGTRWTEQQYEAAENMLAFLCQQGFSLENALYAVSAVRVFTLGCVLFDQESQVAKEERETPTTASMPPLLRQAWELKDHQGAEPAFLFGLELIICGLEKQLKCESGS

SEQ ID NO: 15 - protein, 208 aa, Artificial Sequence
  Sulfonylurea responsive repressor L6-1C03
  misc_feature (80)..(80): Xaa can be any naturally occurring amino acid
  misc_feature (143)..(143): Xaa can be any naturally occurring amino acid
MGSRLDKSKVINSALELLNEVGIEGLTTRKLAQKLGVEQPTLYWHVKNKRALLDALAIEMMDRHQTHYCPLEGESWQDFXRNNAKSMRCALLSHRDGAKVCLGTRWTEQQYESAENMLAFLCQQGFSLENALYAMSAVRVFTXGCVLFDQESQVAKEERETPTTASMPPLLRQAWELKDHQGAEPAFLFGLELIICGLEKQLKCESGS

SEQ ID NO: 16 - protein, 208 aa, Artificial Sequence
  Sulfonylurea responsive repressor L6-1C06
MGSRLDKSKVINSALELLNEVGIEGLTTRKLAQKLGVEQPTLYWHVKNKRALLDALAIEMMDRHQTHFCPLEGESWQDFLRNNAKSMRCALLSHRDGAKVCLGTRWTEKQYETAENMLAFLCQQGFSLENALYAMSAVRVFTLGCVLFDQELQVAKEERETPTTASMPPLVRQVWELKDHQGAEPAFLFGLELIICGLEKQLKCESGS

SEQ ID NO: 17 - protein, 208 aa, Artificial Sequence
  Sulfonylurea responsive repressor L6-1G06
MGSRLDKSKVINSALELLNEVGIEGLTTRKLAQKLGVEQPTLYWHVKNKRALLDALAIEMMDRHATHYCPLEGESWQDFLRNNAKSMRCALLSHRDGAKVCLGTRWTEKHYETAENMLAFLCQQGFSLENALYAVSAVRVFTLGCVLFDQESQVAKEERETPTTASMPPLLRQAWELKDHQGAEPAFLFGLELIICGLEKQLKCESGS

SEQ ID NO: 18 - protein, 208 aa, Artificial Sequence
  Sulfonylurea responsive repressor L6-1G07
MGSRLDKSKVINSALELLNEVGIEGLTTRKLAQKLGVEQPTLYWHVKNKRALLDALAIEMMDRHATHYCPLEGESWQDFLRNTAKSMRCALLSHRDGAKVCLGTRWTEQQYESAENMLAFLCQQGFSLENALYAVSAVRVFTLGCVLFDQESQVAKEERETPTTASMPPLVRQGWELKDHQGAEPAFLFGLELIICGLEKQLKCESGS

SEQ ID NO: 19 - protein, 208 aa, Artificial Sequence
  Sulfonylurea responsive repressor L6-1G09
MGSRLDKSKVINSALELLNEVGIEGLTTRKLAQKLGVEQPTLYWHVKNKRALLDALAIEMMDRHQTHYCPLEGESWQDFLRNNAKSMRCALLSHRDGAKVCLGTRWTEQLYETAENMLAFLCQQGFSLENALYAVSAVRVFTLGCVLFDQELQVAKEERETPTTASMPPLLRQAWELKDHQGAEPAFLFGLELIICGLEKQLKCESGS

SEQ ID NO: 20 - protein, 208 aa, Artificial Sequence
  Sulfonylurea responsive repressor L6-1G10
MGSRLDKSKVINSALELLNEVGIEGLTTRKLAQKLGVEQPTLYWHVKNKRALLDALAIEMMDRHATHYCPLEGESWQDFLRNNAKSMRCALLSHRDGAKVCLGTRWTEQQYETAENMLAFLCQQGFSLENALYAMSAVRVFTLGCVLFDQESQVAKEERETPTTASMPPLLRQVWELKDHQGAEPAFLFGLELIICGLEKQLKCESGS

SEQ ID NO: 21 - protein, 208 aa, Artificial Sequence
  Sulfonylurea responsive repressor L6-1G11
MGSRLDKSKVINSALELLNEVGIEGLTTRKLAQKLGVEQPTLYWHVKNKRALLDALAIEMMDRHQTHVCPLEGESWQDFLRNNAKSMRCALLSHRDGAKVCLGTRWTEQLYETAENQLAFLCQQGFSLENALYAMSAVRVFTLGCVLFDQELQVAKEERETPTTASMPPLLRQVWELKDHQGAEPAFLFGLELIICGLEKQLKCESGS

SEQ ID NO: 22 - protein, 208 aa, Artificial Sequence
  Sulfonylurea responsive repressor L6-1H12
MGSRLDKSKVINSALELLNEVGIEGLTTRKLAQKLGVEQPTLYWHVKNKRALLDALAIEMMDRHQTHICPLEGESWQDFLRNTAKSMRCALLSHRDGAKVCLGTRWTEQHYETAENQLAFLCQQGFSLENALYAMSAVRVFTLGCVLFDQESQVAKEERETPTTASMPPLVRQAWELKDHQGAEPAFLFGLELIICGLEKQLKCESGS

SEQ ID NO: 23 - protein, 208 aa, Artificial Sequence
  Sulfonylurea responsive repressor L6-2A01
MGSRLDKSKVINSALELLNEVGIEGLTTRKLAQKLGVEQPTLYWHVKNKRALLDALAIEMMDRHQTHVCPLEGESWQDFLRNNAKSMRCALLSHRDGAKVCLGTRWTEKQYEAAENMLAFLCQQGFSLENALYAVSAVRVFTLGCVLFDQESQVAKEERETPTTASMPPLLRQGWELKDHQGAEPAFLFGLELIICGLEKQLKCESGS

SEQ ID NO: 24 - protein, 208 aa, Artificial Sequence
  Sulfonylurea responsive repressor L6-2A02
MGSRLDKSKVINSALELLNEVGIEGLTTRKLAQKLGVEQPTLYWHVKNKRALLDALAIEMMDRHQTHYCPLEGESWQDFLRNTAKSMRCALLSHRDGAKVCLGTRWTEQHYETAENMLAFLCQQGFSLENALYAMSAVRVFTLGCVLFDQELQVAKEERETPTTASMPPLVRQVWELKDHQGAEPAFLFGLELIICGLEKQLKCESGS

SEQ ID NO: 25 - protein, 208 aa, Artificial Sequence
  Sulfonylurea responsive repressor L6-2A04
MGSRLDKSKVINSALELLNEVGIEGLTTRKLAQKLGVEQPTLYWHVKNKRALLDALAIEMMDRHQTHVCPLEGESWQDFLRNNAKSMRCALLSHRDGAKVCLGTRWTEQLYETAENQLAFLCQQGFSLENALYAMSAVRNFTLGCVLFDQESQVAKEERETPTTASMPPLVRQAWELKDHQGAEPAFLFGLELIICGLEKQLKCESGS

SEQ ID NO: 26 - protein, 208 aa, Artificial Sequence
  Sulfonylurea responsive repressor L6-2A06
MGSRLDKSKVINSALELLNEVGIEGLTTRKLAQKLGVEQPTLYWHVKNKRALLDALAIEMMDRHQTHYCPLEGESWQDFLRNNAKSMRCALLSHRDGAKVCLGTRWTEQLYETAENMLAFLCQQGFSLENALYAVSAVRVFTLGCVLFDQESQVAKEERETPTTASMPPLVRQVWELKDHQGAEPAFLFGLELIICGLEKQLKCESGS

SEQ ID NO: 27 - protein, 208 aa, Artificial Sequence
  Sulfonylurea responsive repressor L6-2A12
MGSRLDKSKVINSALELLNEVGIEGLTTRKLAQKLGVEQPTLYWHVKNKRALLDALAIEMMDRHATHVCPLEGESWQDFLRNNAKSMRCALLSHRDGAKVCLGTRWTEQMYETAENQLAFLCQQGFSLENALYAMSAVRVFTLGCVLFDQESQVAKEERETPTTASMPPLVRQAWELKDHQGAEPAFLFGLELIICGLEKQLKCESGS

SEQ ID NO: 28 - protein, 208 aa, Artificial Sequence
  Sulfonylurea responsive repressor L6-2B04
MGSRLDKSKVINSALELLNEVGIEGLTTRKLAQKLGVEQPTLYWHVKNKRALLDALAIEMMDRHQTHVCPLEGESWQDFLRNNAKSMRCALLSHRDGAKVCLGTRWTEKQYESAENMLAFLCQQGFSLENALYAVSAVRVFTLGCVLFDQELQVAKEERETPTTASMPPLLRQGWELNDHQGAEPAFLFGLELIICGLEKQLKCESGS

SEQ ID NO: 29 - protein, 208 aa, Artificial Sequence
  Sulfonylurea responsive repressor L6-2B06
MGSRLDKSKVINSALELLNEVGIEGLTTRKLAQKLGVEQPTLYWHVKNKRALLDALAIEMMDRHQTHYCPLEGESWQDFLRNNAKSMRCALLSHRDGAKVCLGTRWTEQHYEGAENMLAFLCQQGFSLENALYAMSAVRVFTLGCVLFDQELQVAKEERETPTTASMPPLVRQVWELKDHQGAEPAFLFGLELIICGLEKQLKCESGS

SEQ ID NO: 30 - protein, 208 aa, Artificial Sequence
  Sulfonylurea responsive repressor L6-2B08
  misc_feature (152)..(152): Xaa can be any naturally occurring amino acid
MGSRLDKSKVINSALELLNEVGIEGLTTRKLAQKLGVEQPTLYWHVKNKRALLDALAIEMMDRHATHVCPLEGESWQDFLRNNAKSMRCALLSHRDGAKVCLGTRWTEQMYETAENQLAFLCQQGFSLENALYAMSAVRVFTLGCVLFDQEXQVAKEERETPTTASMPPLLRQVWELKDHQGAEPAFLFGLELIICGLEKQLKCESGS

SEQ ID NO: 31 - protein, 208 aa, Artificial Sequence
  Sulfonylurea responsive repressor L6-2B09
MGSRLDKSKVINSALELLNEVGIEGLTTRKLAQKLGVEQPTLYWHVKNKRALLDALAIEMMDRHATHYCPLEGESWQDFLRNTAKSMRCALLSHRDGAKVCLGTRWTEKQYETAENQLAFLCQQGFSLENALYAMSAVRVFTLGCVLFDQELQVAKEERETPTTASMPPLVRQVWELKDHQGAEPAFLFGLELIICGLEKQLKCESGS

SEQ ID NO: 32 - protein, 208 aa, Artificial Sequence
  Sulfonylurea responstive repressor L6-2B10
  misc_feature (65)..(65): Xaa can be any naturally occurring amino acid
MGSRLDKSKVINSALELLNEVGIEGLTTRKLAQKLGVEQPTLYWHVKNKRALLDALAIEMMDRHXTHYCPLEGESWQDFLRNTAKSMRCALLSHRDGAKVCLGTRWTEKQYETAENQLAFLCQQGFSLENALYAMSAVRVFTLGCVLFDQESQVAKEERETPTTASMPPLVRQGWELKDHQGAEPAFLFGLELIICGLEKQLKCESGS

SEQ ID NO: 33 - protein, 208 aa, Artificial Sequence
  Sulfonylurea responsive repressor L6-2B11
MGSRLDKSKVINSALELLNEVGIEGLTTRKLAQKLGVEQPTLYWHVKNKRALLDALAIEMMDRHQTHMCPLEGESWQDFLRNNAKSMRCALLSHRDGAKVCLGTRWTEKHYETAENMLAFLCQQGFSLENALYAVSAVRVFTLGCVLFDQESQVAKEERETPTTASMPPLVRQGWELKDHQGAEPAFLFGLELIICGLEKQLKCESGS

SEQ ID NO: 34 - protein, 208 aa, Artificial Sequence
  Sulfonylurea responsive repressor L6-2C02
MGSRLDKSKVINSALELLNEVGIEGLTTRKLAQKLGVEQPTLYWHVKNKRALLDALAIEMMDRHQTHLCPLEGESWQDFLRNNAKSMRCALLSHRDGAKVCLGTRWTEKQYESAENMLAFLCQQGFSLENALYAMSAVRVFTLGCVLFDQESQVAKEERETPTTASMPPLVRQVWELKDHQGAEPAFLFGLELIICGLEKQLKCESGS

SEQ ID NO: 35 - protein, 208 aa, Artificial Sequence
  Sulfonylurea responsive repressor L6-2C05
MGSRLDKSKVINSALELLNEVGIEGLTTRKLAQKLGVEQPTLYWHVKNKRALLDALAIEMMDRHQTHYCPLEGESWQDFLRNTAKSMRCALLSHRDGAKVCLGTRWTEKHYETAENQLAFLCQQGFSLENALYAVSAVRVFTLGCVLFDQESQVAKEERETPTTASMPPLVRQVWELKDHQGAEPAFLFGLELIICGLEKQLKCESGS

SEQ ID NO: 36 - protein, 208 aa, Artificial Sequence
  Sulfonylurea responsive repressor L6-2C09
MGSRLDKSKVINSALELLNEVGIEGLTTRKLAQKLGVEQPTLYWHVKNKRALLDALAIEMMDRHQTHYCPLEGESWQDFLRNTAKSMRCALLSHRDGAKVCLGTRWTEQLYETAENQLAFLCQQGFSLENALYAMSAVRVFTLGCVLFDQELQVAKEERETPTTASMPPLLRQAWELKDHQGAEPAFLFGLELIICGLEKQLKCESGS

SEQ ID NO: 37 - protein, 208 aa, Artificial Sequence
  Sulfonylurea responsive repressor L6-2C10
  misc_feature (68)..(68): Xaa can be any naturally occurring amino acid
  misc_feature (113)..(113): Xaa can be any naturally occurring amino acid
MGSRLDKSKVINSALELLNEVGIEGLTTRKLAQKLGVEQPTLYWHVKNKRALLDALAIEMMDRHQTHXCPLEGESWQDFLRNTAKSMRCALLSHRDGAKVCLGTRWTEQQYEXAENLLAFLCQQGFSLENALYAMSAVRVFTLGCVLFDQEIQVAKEERETPTTASMPPLLRQVLELKDHQGAEPAFLFGLELIICGLEKQLKCESGS

SEQ ID NO: 38 - protein, 208 aa, Artificial Sequence
  Sulfonylurea responsive repressor L6-2C11
MGSRLDKSKVINSALELLNEVGIEGLTTRKLAQKLGVEQPTLYWHVKNKRALLDALAIEMMDRHQTHYCPLEGESWQDFLRNTAKSMRCALLSHRDGAKVCLGTRWTEKHYETAENMLAFLCQQGFSLENALYAVSAVRVFTLGCVLFDQESQVAKEERETPTTASMPPLLRQVWELKDHQGAEPAFLFGLELIICGLEKQLKCESGS

SEQ ID NO: 39 - protein, 208 aa, Artificial Sequence
  Sulfonylurea responsive repressor L6-2D01
MGSRLDKSKVINSALELLNEVGIEGLTTRKLAQKLGVEQPTLYWHVKNKRALLDALAIEMMDRHQTHVCPLEGESWQDFLRNNAKSMRCALLSHRDGAKVCLGTRWTEQLYETAENMLAFLCQQGFSLENALYAMSAVRVFTLGCVLFDQESQVAKEERETPTTASMPPLVRQGWELKDHQGAEPAFLFGLELIICGLEKQLKCESGS

SEQ ID NO: 40 - protein, 208 aa, Artificial Sequence
  Sulfonylurea responsive repressor L6-2D02
  misc_feature (110)..(110): Xaa can be any naturally occurring amino acid
MGSRLDKSKVINSALELLNEVGIEGLTTRKLAQKLGVEQPTLYWHVKNKRALLDALAIEMMDRHATHLCPLEGESWQDFLRNNAKSMRCALLSHRDGAKVCLGTRWTEKXYESAENQLAFLCQQGFSLENALYAMSAVRVFTLGCVLFDQELQVAKEERETPTTASMPPLLRQAWELKDHQGAEPAFLFGLELIICGLEKQLKCESGS

SEQ ID NO: 41 - protein, 208 aa, Artificial Sequence
  Sulfonylurea responsive repressor L6-2D03
MGSRLDKSKVINSALELLNEVGIEGLTTRKLAQKLGVEQPTLYWHVKNKRALLDALAIEMMDRHQTHYCPLEGESWQDFLRNTAKSMRCALLSHRDGAKVCLGTRWTEQQYETAENMLAFLCQQGFSLENALYAVSAVRNFTLGCVLFDQESQVAKEERETPTTASMPPLVRQAWELKDHQGAEPAFLFGLELIICGLEKQLKCESGS

SEQ ID NO: 42 - protein, 208 aa, Artificial Sequence
  Sulfonylurea responsive repressor L6-2D04
MGSRLDKSKVINSALELLNEVGIEGLTTRKLAQKLGVEQPTLYWHVKNKRALLDALAIEMMDRHQTHFCPLEGESWQDFLRNNAKSMRCALLSHRDGAKVWLGTRWTEQMYETAENMLAFLCQQGFSLENALYAVSAVRNFTLGCVLFDQESQVAKEERETPTTASMPPLLRQGWELKDHQGAEPAFLFGLELIICGLEKQLKCESGS

SEQ ID NO: 43 - protein, 208 aa, Artificial Sequence
  Sulfonylurea responsive repressor L6-2D07
MGSRLDKSKVINSALELLNEVGIEGLTTRKLAQKLGVEQPTLYWHVKNKRALLDALAIEMMDRHQTHFCPLEGESWQDFLRNTAKSMRCALLSHRDGAKVCLGTRWTEQQYETAENMLAFLCQQGFSLENALYAMSAVRVFTLGCVLFDQESQVAKEERETPTTASMPPLVRQAWELKDHQGAEPAFLFGLELIICGLEKQLKCESGS

SEQ ID NO: 44 - protein, 208 aa, Artificial Sequence
  Sulfonylurea responsive repressor L6-2D11
MGSRLDKSKVINSALELLNEVGIEGLTTRKLAQKLGVEQPTLYWHVKNKRALLDALAIEMMDRHQTHYCPLEGESWQDFLRNTAKSMRCALLSHRDGAKVCLGTRWTEQQYESAENQLAFLCQQGFSLENALYAVSAVRVFTLGCVLFDQESQVAKEERETPTTASMPPLLRQAWELKDHQGAEPAFLFGLELIICGLEKQLKCESGS

SEQ ID NO: 45 - protein, 208 aa, Artificial Sequence
  Sulfonylurea responsive repressor L6-2D12
MGSRLDKSKVINSALELLNEVGIEGLTTRKLAQKLGVEQPTLYWHVKNKRALLDALAIEMMDRHQTHMCPLEGESWQDFLRNNAKSMRCALLSHRDGAKVCLGTRWTEKMYEAAENMLAFLCQQGFSLENALYAVSAVRVFTLGCVLFDQELQVAKEERETPTTASMPPLLRQAWELKDHQGAEPAFLFGLELIICGLEKQLKCESGS

SEQ ID NO: 46 - protein, 208 aa, Artificial Sequence
  Sulfonylurea responsive repressor L6-2E02
MGSRLDKSKVINSALELLNEVGIEGLTTRKLAQKLGVEQPTLYWHVKNKRALLDALAIEMMDRHATHYCPLEGESWQDFIRNTAKSMRCALLSHRDGAKVCLGTRWTEKHYETAENMLAFLCQQGFSLENALYAVSAVGNFTLGCVLFDQESQVAKEERETPTTASMPPLLRQVWELKDHQGAEPAFLFGLELIICGLEKQLKCESGS

SEQ ID NO: 47 - protein, 208 aa, Artificial Sequence
  Sulfonylurea responsive repressor L6-2E03
MGSRLDKSKVINSALELLNEVGIEGLTTRKLAQKLGVEQPTLYWHVKNKRALLDALAIEMMDRHATHLCPLEGESWQDFLRNTAKSMRCALLSHRDGAKVCLGTRWTEKQYESAENQLAFLCQQGFSLENALYAMSAVRVFTLGCVLFDQESQVAKEERETPTTASMPPLLRQVWELKDHQGAEPAFLFGLELIICGLEKQLKCESGS

SEQ ID NO: 48 - protein, 208 aa, Artificial Sequence
  Sulfonylurea responsive repressor L6-2E04
MGSRLDKSKVINSALELLNEVGIEGLTTRKLAQKLGVEQPTLYWHVKNKRALLDALAIEMMDRHQTHYCPLEGESWQDFLRNNAKSMRCALLSHRDGAKVCLGTRWTEQMYESAENMLAFLCQQGFSLENALYAVSAVRVFTLGCVLFDQESQVAKEERETPTTASMPPLLRQGWELKDHQGAEPAFLFGLELIICGLEKQLKCESGS

SEQ ID NO: 49 - protein, 208 aa, Artificial Sequence
  Sulfonylurea responsive repressor L6-2E05
MGSRLDKSKVINSALELLNEVGIEGLTTRKLAQKLGVEQPTLYWHVKNKRALLDALAIEMMDRHQTHFCPLEGESWQDFLRNNAKSMRCALLSHRDGAKVCLGTRWTEQMYEGAENMLAFLCQQGFSLENALYAMSAVRVFTLGCVLFDQESQVAKEERETPTTASMPPLLRQGWELKDHQGAEPAFLFGLELIICGLEKQLKCESGS

SEQ ID NO: 50 - protein, 208 aa, Artificial Sequence
  Sulfonylurea responsive repressor L6-2E07
MGSRLDKSKVINSALELLNEVGIEGLTTRKLAQKLGVEQPTLYWHVKNKRALLDALAIEMMDRHQTHYCPLEGESWQDFLRNNAKSMRCALLSHRDGAKVCLGTRWTEQHYEAAENMLAFLCQQGFSLENALYAMSAVRVFTLGCVLFDQESQVAKEERETPTTASMPPLVRQAWELKDHQGAEPAFLFGLELIICGLEKQLKCESGS

SEQ ID NO: 51 - protein, 208 aa, Artificial Sequence
  Sulfonylurea responsive repressor L6-2E08
MGSRLDKSKVINSALELLNEVGIEGLTTRKLAQKLGVEQPTLYWHVKNKRALLDALAIEMMDRHATHYCPLEGESWQDFLRNNAKSMRCALLSHRDGAKVCLGTRWTEQLYETAENQLAFLCQQGFSLENALYAMSAVRNFTLGCVLFDQESQVAKEERETPTTASMPPLVRQAWELKDHQGAEPAFLFGLELIICGLEKQLKCESGS

SEQ ID NO: 52 - protein, 208 aa, Artificial Sequence
  Sulfonylurea responsive repressor L6-2E09
MGSRLDKSKVINSALELLNEVGIEGLTTRKLAQKLGVEQPTLYWHVKNKRALLDALAIEMMDRHATHMCPLEGESWQDFLRNTAKSMRCALLSHRDGAKVCLGTRWTEKQYETAENMLAFLCQQGFSLENALYAVSAVRVFTLGCVLFDQESQVAKEERETPTTASMPPLLRQVWELKDHQGAEPAFLFGLELIICGLEKQLKCESGS

SEQ ID NO: 53 - protein, 208 aa, Artificial Sequence
  Sulfonylurea responsive repressor L6-2E11
MGSRLDKSKVINSALELLNEVGIEGLTTRKLAQKLGVEQPTLYWHVKNKRALLDALAIEMMDRHATHYCPLEGESWQDFLRNTAKSMRCALLSHRDGAKVCLGTRWTEKLYETAENMLAFLCQQGFSLENALYAVSAVRVFTLGCVLFDQELQVAKEERETPTTASMPPLVRQAWELKDHQGAEPAFLFGLELIICGLEKQLKCESGS

SEQ ID NO: 54 - protein, 208 aa, Artificial Sequence
  Sulfonylurea responsive repressor L6-2F08
MGSRLDKSKVINSALELLNEVGIEGLTTRKLAQKLGVEQPTLYWHVKNKRALLDALAIEMMDRHATHFCPLEGESWQDFLRNTAKSMRCALLSHRDGAKVCLGTRWTEQLYETAENMLAFLCQQGFSLENALYAMSAVRVFTLGCVLFDQESQVAKEERETPTTASMPPLVRQGWELKDHQGAEPAFLFGLELIICGLEKQLKCESGS

SEQ ID NO: 55 - protein, 208 aa, Artificial Sequence
  Sulfonylurea responsive repressor L6-2F10
MGSRLDKSKVINSALELLNEVGIEGLTTRKLAQKLGVEQPTLYWHVKNKRALLDALAIEMMDRHQTHLCPLEGESWQDFLRNNAKSMRCALLSHRDGAKVCLGTRWTEKHYEAAENQLAFLCQQGFSLENALYAMSAVRVFTLGCVLFDQESQVAKEERETPTTASMPPLLRQGWELKDHQGAEPAFLFGLELIICGLEKQLKCESGS

SEQ ID NO: 56 - protein, 208 aa, Artificial Sequence
  Sulfonylurea responsive repressor L6-2F11
  misc_feature (65)..(65): Xaa can be any naturally occurring amino acid
  misc_feature (110)..(110): Xaa can be any naturally occurring amino acid
MGSRLDKSKVINSALELLNEVGIEGLTTRKLAQKLGVEQPTLYWHVKNKRALLDALAIEMMDRHXTHYCPLEGESWQDFLRNNAKSMRCALLSHRDGAKVWLGTRWTEQXYETAENQLAFLCQQGFSLENALYAVSAVRVFTLGCVLFDQELQVAKEERETPTTASMPPLLRQGLELKDHQGAEPAFLFGLELIICGLEKQLKCESGS

SEQ ID NO: 57 - protein, 208 aa, Artificial Sequence
  Sulfonylurea responsive repressor L6-2F12
MGSRLDKSKVINSALELLNEVGIEGLTTRKLAQKLGVEQPTLYWHVKNKRALLDALAIEMMDRHATHYCPLEGESWQDFLRNTAKSMRCALLSHRDGAKVCLGTRWTEQQYESAENMLAFLCQQGFSLENALYAMSAVRVFTLGCVLFDQELQVAKEERETPTTASMPPLVRQGWELKDHQGAEPAFLFGLELIICGLEKQLKCESGS

SEQ ID NO: 58 - protein, 208 aa, Artificial Sequence
  Sulfonylurea responsive repressor L6-2G01
MGSRLDKSKVINSALELLNEVGIEGLTTRKLAQKLGVEQPTLYWHVKNKRALLDALAIEMMDRHATHYCPLEGESWQDFLRNTAKSMRCALLSHRDGAKVCLGTRWTEQQYETAENMLAFLCQQGFSLENALYAVSAVRVFTLGCVLFDQELQVAKEERETPTTASMPPLVRQAWELKDHQGAEPAFLFGLELIICGLEKQLKCESGS

SEQ ID NO: 59 - protein, 208 aa, Artificial Sequence
  Sulfonylurea responsive repressor L6-2G02
  misc_feature (68)..(68): Xaa can be any naturally occurring amino acid
  misc_feature (83)..(83): Xaa can be any naturally occurring amino acid
  misc_feature (101)..(101): Xaa can be any naturally occurring amino acid
  misc_feature (171)..(171): Xaa can be any naturally occurring amino acid
MGSRLDKSKVINSALELLNEVGIEGLTTRKLAQKLGVEQPTLYWHVKNKRALLDALAIEMMDRHPTHXCPLEGESWQDFLRNXAKSMRCALLSHRDGAKVXLGTRWTEQLYETAENMLAFLCQQGFSLENALYAMSAVRVFTLGCVLFDQESQVAKEERETPTTASMPPLXRQVWELKDHQGAEPAFLFGLELIICGLEKQLKCESGS

SEQ ID NO: 60 - protein, 208 aa, Artificial Sequence
  Sulfonylurea responsive repressor L6-2G03
  misc_feature (171)..(171): Xaa can be any naturally occurring amino acid
MGSRLDKSKVINSALELLNEVGIEGLTTRKLAQKLGVEQPTLYWHVKNKRALLDALAIEMMDRHATHYCPLEGESWQDFLRNNAKSMRCALLSHRDGAKVCLGTRWTEQLYETAENQLAFLCQQGFSLENALYAVSAVRVFTLGCVLFDQESQVAKEERETPTTASMPPLXRQGWELKDHQGAEPAFLFGLELIICGLEKQLKCESGS

SEQ ID NO: 61 - protein, 208 aa, Artificial Sequence
  Sulfonylurea responsive repressor L6-2G05
MGSRLDKSKVINSALELLNEVGIEGLTTRKLAQKLGVEQPTLYWHVKNKRALLDALAIEMMDRHQTHYCPLEGESWQDFLRNNAKSMRCALLSHRDGAKVCLGTRWTEQQYEAAENQLAFLCQQGFSLENALYAMSAVRVFTLGCVLFDQELQVAKEERETPTTASMPPLVRQAWELKDHQGAEPAFLFGLELIICGLEKQLKCESGS

SEQ ID NO: 62 - protein, 208 aa, Artificial Sequence
  Sulfronylurea responsive repressor L6-2G10
MGSRLDKSKVINSALELLNEVGIEGLTTRKLAQKLGVEQPTLYWHVKNKRALLDALAIEMMDRHQTHYCPLEGESWQDFLRNTAKSMRCALLSHRDGAKVCLGTRWTEQMYESAENMLAFLCQQGFSLENALYAVSAVRVFTLGCVLFDQESQVAKEERETPTTASMPPLLRQGWELKDHQGAEPAFLFGLELIICGLEKQLKCESGS

SEQ ID NO: 63 - protein, 208 aa, Artificial Sequence
  Sulfonylurea responsive repressor L6-2H01
MGSRLDKSKVINSALELLNEVGIEGLTTRKLAQKLGVEQPTLYWHVKNKRALLDALAIEMMDRHQTHYCPLEGESWQDFLRNNAKSMRCALLSHRDGAKVCLGTRWTEQQYESAENQLAFLCQQGFSLENALYAVSAVRVFTLGCVLFDQESQVAKEERETPTTASMPPLVRQAWELKDHQGAEPAFLFGLELIICGLEKQLKCESGS

SEQ ID NO: 64 - protein, 208 aa, Artificial Sequence
  Sulfonylurea responsive repressor L6-2H02
MGSRLDKSKVINSALELLNEVGIEGLTTRKLAQKLGVEQPTLYWHVKNKRALLDALAIEMMDRHQTHYCPLEGESWQDFLRNNAKSMRCALLSHRDGAKVCLGTRWTEKLYETAENMLAFLCQQGFSLENALYAVSAVRVFTLGCVLFDQESQVAKEERETPTTASMPPLLRQVWELKDHQGAEPAFLFGLELIICGLEKQLKCESGS

SEQ ID NO: 65 - protein, 208 aa, Artificial Sequence
  Sulfonylurea responsive repressor L6-2H03
MGSRLDKSKVINSALELLNEVGIEGLTTRKLAQKLGVEQPTLYWHVKNKRALLDALAIEMMDRHATHYCPLEGESWQDFLRNTAKSMRCALLSHRDGAKVCLGTRWTEQMYETAENMLAFLCQQGFSLENALYAMSAVRVFTLGCVLFDQELQVAKEERETPTTASMPPLVRQGWELKDHQGAEPAFLFGLELIICGLEKQLKCESGS

SEQ ID NO: 66 - protein, 208 aa, Artificial Sequence
  Sulfornylurea responsive repressor L6-2H04
MGSRLDKSKVINSALELLNEVGIEGLTTRKLAQKLGVEQPTLYWHVKNKRALLDALAIEMMDRHQTHYCPLEGESWQDFLRNNAKSMRCALLSHRDGAKVCLGTRWTEQMYETAENQLAFLCQQGFSLENALYAMSAVRVFTLGCVLFDQELQVAKEERETPTTASMPPLLRQGWELKDHQGAEPAFLFGLELIICGLEKQLKCESGS

SEQ ID NO: 67 - protein, 208 aa, Artificial Sequence
  Sulfonylurea responsive repressor L6-2H06
MGSRLDKSKVINSALELLNEVGIEGLTTRKLAQKLGVEQPTLYWHVKNKRALLDALAIEMMDRHATHYCPLEGESWQDFLRNTAKSMRCALLSHRDGAKVCLGTRWTEQQYEAAENQLAFLCQQGFSLENALYAVSAVRVFTLGCVLFDQESQVAKEERETPTTASMPPLLRQGWELKDHQGAEPAFLFGLELIICGLEKQLKCESGS

SEQ ID NO: 68 - protein, 208 aa, Artificial Sequence
  Sulfonylurea responsive repressor L6-2H07
MGSRLDKSKVINSALELLNEVGIEGLTTRKLAQKLGVEQPTLYWHVKNKRALLDALAIEMMDRHQTHYCPLEGESWQDFLRNTAKSMRCALLSHRDGAKVWLGTRWTEQQYESAENMLAFLCQQGFSLENALYAVSAVRVFTLGCVLFDQELQVAKEERETPTTASMPPLVRQAWELKDHQGAEPAFLFGLELIICGLEKQLKCESGS

SEQ ID NO: 69 - protein, 208 aa, Artificial Sequence
  Sulfonylurea responsive repressor L6-2H10
MGSRLDKSKVINSALELLNEVGIEGLTTRKLAQKLGVEQPTLYWHVKNKRALLDALAIEMMDRHQTHMCPLEGESWQDFLRNNAKSMRCALLSHRDGAKVCLGTRWTEKLYETAENQLAFLCQQGFSLENALYAVSAVRVFTLGCVLFDQESQVAKEERETPTTASMPPLVRQAWELKDHQGAEPAFLFGLELIICGLEKQLKCESGS

SEQ ID NO: 70 - protein, 208 aa, Artificial Sequence
  Sulfonylurea responsive repressor L6-2H11
MGSRLDKSKVINSALELLNEVGIEGLTTRKLAQKLGVEQPTLYWHVKNKRALLDALAIEMMDRHQTHYCPLEGESWQDFLRNTAKSMRCALLSHRDGAKVCLGTRWTEKQYETAENMLAFLCQQGFSLENALYAMSAVRVFTLGCVLFDQESQVAKEERETPTTASMPPLVRQVWELKDHQGAEPAFLFGLELIICGLEKQLKCESGS

SEQ ID NO: 71 - protein, 208 aa, Artificial Sequence
  Sulfonylurea responsive repressor L6-3A01
MGSRLDKSKVINSALELLNEVGIEGLTTRKLAQKLGVEQPTLYWHVKNKRALLDALAIEMMDRHQTHFCPLEGESWQDFLRNNAKSMRCALLSHRDGAKVCLGTRWTEQQYESAENQLAFLCQQGFSLENALYAVSAVRVFTLGCVLFDQELQVAKEERETPTTASMPPLLRQALELKDHQGAEPAFLFGLELIICGLEKQLKCESGS

SEQ ID NO: 72 - protein, 208 aa, Artificial Sequence
  Sulfonylurea responsive repressor L6-3A02
MGSRLDKSKVINSALELLNEVGIEGLTTRKLAQKLGVEQPTLYWHVKNKRALLDALAIEMMDRHATHYCPLEGESWQDFLRNNAKSMRCALLSHRDGAKVCLGTRWTEKQYESAENMLAFLCQQGFSLENALYAVSAVRNFTLGCVLFDQESQVAKEERETPTTASMPPLLRQGWELKDHQGAEPAFLFGLELIICGLEKQLKCESGS

SEQ ID NO: 73 - protein, 208 aa, Artificial Sequence
  Sulfonylurea responsive repressor L6-3A03
MGSRLDKSKVINSALELLNEVGIEGLTTRKLAQKLGVEQPTLYWHVKNKRALLDALAIEMMDRHATHMCPLEGESWQDFLRNNAKSMRCALLSHRDGAKVCLGTRWTEKHYESAENMLAFLCQQGFSLENALYAVSAVRVFTLGCVLFDQELQVAKEERETPTTASMPPLVRQVWELKDHQGAEPAFLFGLELIICGLEKQLKCESGS

SEQ ID NO: 74 - protein, 208 aa, Artificial Sequence
  Sulfonylurea responsive repressor L6-3A06
  misc_feature (65)..(65): Xaa can be any naturally occurring amino acid
  misc_feature (117)..(117): Xaa can be any naturally occurring amino acid
MGSRLDKSKVINSALELLNEVGIEGLTTRKLAQKLGVEQPTLYWHVKNKRALLDALAIEMMDRHXTHLCPLEGESWQDFLRNTAKSMRCALLSHRDGAKVCLGTRWTEQLYEAAENXLAFLCQQGFSLENALYAMSAVRVFTLGCVLFDQESQVAKEERETPTTASMPPLVRQVWELKDHQGAEPAFLFGLELIICGLEKQLKCESGS

SEQ ID NO: 75 - protein, 208 aa, Artificial Sequence
  Sulfonylurea responsive repressor L6-3A11
MGSRLDKSKVINSALELLNEVGIEGLTTRKLAQKLGVEQPTLYWHVKNKRALLDALAIEMMDRHQTHYCPLEGESWQDFLRNNAKSMRCALLSHRDGAKVCLGTRWTEQHYEGAENMLAFLCQQGFSLENALYAVSAVRVFTLGCVLFDQESQVAKEERETPTTASMPPLLRQVWELKDHQGAEPAFLFGLELIICGLEKQLKCESGS

SEQ ID NO: 76 - protein, 208 aa, Artificial Sequence
  Sulfonylurea responsive repressor L6-3B08
MGSRLDKSKVINSALELLNEVGIEGLTTRKLAQKLGVEQPTLYWHVKNKRALLDALAIEMMDRHATHICPLEGESWQDFLRNNAKSMRCALLSHRDGAKVCLGTRWTEQLYESAENMLAFLCQQGFSLENALYAVSAVRVFTLGCVLFDQESQVAKEERETPTTASMPPLVRQVWELKDHQGAEPAFLFGLELIICGLEKQLKCESGS

SEQ ID NO: 77 - protein, 208 aa, Artificial Sequence
  Sulfonylurea responsive repressor L6-3B09
MGSRLDKSKVINSALELLNEVGIEGLTTRKLAQKLGVEQPTLYWHVKNKRALLDALAIEMMDRHQTHYCPLEGESWQDFLRNNAKSMRCALLSHRDGAKVCLGTRWTEKQYETAENQLAFLCQQGFSLENALYAMSAVRNFTLGCVLFDQESQVAKEERETPTTASMPPLLRQGWELKDHQGAEPAFLFGLELIICGLEKQLKCESGS

SEQ ID NO: 78 - protein, 208 aa, Artificial Sequence
  Sulfonylurea responsive repressor L6-3C02
MGSRLDKSKVINSALELLNEVGIEGLTTRKLAQKLGVEQPTLYWHVKNKRALLDALAIEMMDRHQTHYCPLEGESWQDFLRNNAKSMRCALLSHRDGAKVCLGTRWTEQHYETAENMLAFLCQQGFSLENALYAMSAVRVFTLGCVLFDQESQVAKEERETPTTASMPPLLRQGWELKDHQGAEPAFLFGLELIICGLEKQLKCESGS

SEQ ID NO: 79 - protein, 208 aa, Artificial Sequence
  Sulfonylurea responsive repressor L6-3C04
  misc_feature (110)..(110): Xaa can be any naturally occurring amino acid
  misc_feature (113)..(113): Xaa can be any naturally occurring amino acid
  misc_feature (117)..(117): Xaa can be any naturally occurring amino acid
  misc_feature (135)..(135): Xaa can be any naturally occurring amino acid
  misc_feature (140)..(140): Xaa can be any naturally occurring amino acid
MGSRLDKSKVINSALELLNEVGIEGLTTRKLAQKLGVEQPTLYWHVKNKRALLDALAIEMMDRHPTHLCPLEGESWQDFLRNTAKSMRCALLSHRDGAKVCLGTRWTEQXYEXAENXLAFLCQQGFSLENALYAXSAVRXFTLGCVLFDQEIQVAKEERETPTTASMPPLVRQAWELKDHQGAEPAFLFGLELIICGLEKQLKCESGS

SEQ ID NO: 80 - protein, 208 aa, Artificial Sequence
  Sulfonylurea responsive repressor L6-3C05
MGSRLDKSKVINSALELLNEVGIEGLTTRKLAQKLGVEQPTLYWHVKNKRALLDALAIEMMDRHATHICPLEGESWQDFLRNNAKSMRCALLSHRDGAKVCLGTRWTEQMYETAENQLAFLCQQGFSLENALYAMSAVRVFTLGCVLFDQELQVAKEERETPTTASMPPLLRQVWELKDHQGAEPAFLFGLELIICGLEKQLKCESGS

SEQ ID NO: 81 - protein, 208 aa, Artificial Sequence
  Sulfonylurea responsive repressor L6-3C06
MGSRLDKSKVINSALELLNEVGIEGLTTRKLAQKLGVEQPTLYWHVKNKRALLDALAIEMMDRHQTHICPLEGESWQDFLRNNAKSMRCALLSHRDGAKVCLGTRWTEKHYETAENMLAFLCQQGFSLENALYAMSAVRVFTLGCVLFDQESQVAKEERETPTTASMPPLVRQVWELKDHQGAEPAFLFGLELIICGLEKQLKCESGS

SEQ ID NO: 82 - protein, 208 aa, Artificial Sequence
  Sulfonylurea responsive repressor L6-3D03
MGSRLDKSKVINSALELLNEVGIEGLTTRKLAQKLGVEQPTLYWHVKNKRALLDALAIEMMDRHQTHVCPLEGESWQDFLRNTAKSMRCALLSHRDGAKVCLGTRWTEQLYETAENMLAFLCQQGFSLENALYAVSAVRVFTLGCVLFDQESQVAKEERETPTTARMPPLLRQGWELKDHQGAEPAFLFGLELIICGLEKQLKCESGS

SEQ ID NO: 83 - protein, 208 aa, Artificial sequence
  Sulfonylurea responsive repressor L6-3D05
MGSRLDKSKVINSALELLNEVGIEGLTTRKLAQKLGVEQPTLYWHVKNKRALLDALAIEMMDRHQTHYCPLEGESWQDFLRNTAKSMRCALLSHRDGAKVCLGTRWTEQLYESAENMLAFLCQQGFSLENALYAMSAVRVFTLGCVLFDQELQVAKEERETPTTASMPPLLRQGWELKDHQGAEPAFLFGLELIICGLEKQLKCESGS

SEQ ID NO: 84 - protein, 208 aa, Artificial Sequence
  Sulfonylurea responsive repressor L6-3D09
MGSRLDKSKVINSALELLNEVGIEGLTTRKLAQKLGVEQPTLYWHVKNKRALLDALAIEMMDRHQTHYCPLEGESWQDFLRNTAKSMRCALLSHRDGAKVCLGTRWTEKQYETAENQLAFLCQQGFSLENALYAVSAVRVFTLGCVLFDQESQVAKEERETPTTASMPPLVRQVWELKDHQGAEPAFLFGLELIICGLEKQLKCESGS

SEQ ID NO: 85 - protein, 208 aa, Artificial Sequence
  Sulfonylurea responsive repressor L6-3E08
MGSRLDKSKVINSALELLNEVGIEGLTTRKLAQKLGVEQPTLYWHVKNKRALLDALAIEMMDRHATHYCPLEGESWQDFLRNNAKSMRCALLSHRDGAKVCLGTRWTEQHYETAENQLAFLCQQGFSLENALYAMSAVRVFTLGCVLFDQESQVAKEERETPTTASMPPLVRQGWELKDHQGAEPAFLFGLELIICGLEKQLKCESGS

SEQ ID NO: 86 - protein, 208 aa, Artificial Sequence
  Sulfonylurea responsive repressor L6-3E09
MGSRLDKSKVINSALELLNEVGIEGLTTRKLAQKLGVEQPTLYWHVKNKRALLDALAIEMMDRHQTHYCPLEGESWQDFLRNNAKSMRCALLSHRDGAKVCLGTRWTEKHYETAENQLAFLCQQGFSLENALYAMSAVRVFTLGCVLFDQESQVAKEERETPTTASMPPLLRQAWELKDHQGAEPAFLFGLELIICGLEKQLKCESGS

SEQ ID NO: 87 - protein, 208 aa, Artificial Sequence
  Sulfonylurea responsive repressor L6-3E10
MGSRLDKSKVINSALELLNEVGIEGLTTRKLAQKLGVEQPTLYWHVKNKRALLDALAIEMMDRHQTHYCPLEGESWQDFLRNNAKSMRCALLSHRDGAKVCLGTRWTEQHYEAAENMLAFLCQQGFSLENALYAVSAVRVFTLGCVLFDQESQVAKEERETPTTASMPPLLRQVWELKDHQGAEPAFLFGLELIICGLEKQLKCESGS

SEQ ID NO: 88 - protein, 208 aa, Artificial Sequence
  Sulfonylurea responsive repressor L6-3F02
MGSRLDKSKVINSALELLNEVGIEGLTTRKLAQKLGVEQPTLYWHVKNKRALLDALAIEMMDRHQTHYCPLEGESWQDFLRNNAKSMRCALLSHRDGAKVCLGTRWTEQMYEAAENQLAFLCQQGFSLENALYAVSAVRVFTLGCVLFDQELQVAKEERETPTTASMPPLVRQVWELKDHQGAEPAFLFGLELIICGLEKQLKCESGS

SEQ ID NO: 89 - protein, 208 aa, Artificial Sequence
  Sulfonylurea responsive repressor L6-3F09
MGSRLDKSKVINSALELLNEVGIEGLTTRKLAQKLGVEQPTLYWHVKNKRALLDALAIEMMDRHQTHYCPLEGESWQDFLRNNAKSMRCALLSHRDGAKVCLGTRWTEKLYEAAENMLAFLCQQGFSLENALYAVSAVRVFTLGCVLFDQESQVAKEERETPTTASMPPLVRQVWELKDHQGAEPAFLFGLELIICGLEKQLKCESGS

SEQ ID NO: 90 - protein, 208 aa, Artificial Sequence
  Sulfonylurea responsive repressor L6-3F12
  misc_feature (140)..(140): Xaa can be any naturally occurring amino acid
MGSRLDKSKVINSALELLNEVGIEGLTTRKLAQKLGVEQPTLYWHVKNKRALLDALAIEMMDRHQTHYCPLEGESWQDFLRNTAKSMRCALLSHRDGAKVCLGTRWTEQMYEAAENMLAFLCQQGFSLENALYAMSAVRXFTLGCVLFDQESQVAKEERETPTTASMPPLVRQAWELKDHQGAEPAFLFGLELIICGLEKQLKCESGS

SEQ ID NO: 91 - protein, 208 aa, Artificial Sequence
  Sulfonylurea responsive repressor L6-3G03
  misc_feature (113)..(113): Xaa can be any naturally occurring amino acid
  misc_feature (140)..(140): Xaa can be any naturally occurring amino acid
MGSRLDKSKVINSALELLNEVGIEGLTTRKLAQKLGVEQPTLYWHVKNKRALLDALAIEMMDRHATHYCPLEGESWQDFLRNNAKSMRCALLSHRDGAKVCLGTRWTEQLYEXAENQLAFLCQQGFSLENALYAMSAVRXFTLGCVLFDQESQVAKEERETPTTASMPPLVRQGWELKDHQGAEPAFLFGLELIICGLEKQLKCESGS

SEQ ID NO: 92 - protein, 208 aa, Artificial Sequence
  Sulfonylurea responsive repressor L6-3G05
MGSRLDKSKVINSALELLNEVGIEGLTTRKLAQKLGVEQPTLYWHVKNKRALLDALAIEMMDRHQTHYCPLEGESWQDFLRNTAKSMRCALLSHRDGAKVCLGTRWTEKQYESAENQLAFLCQQGFSLENALYAMSAVRVFTLGCVLFDQESQVAKEERETPTTASMPPLVRQGWELKDHQGAEPAFLFGLELIICGLEKQLKCESGS

SEQ ID NO: 93 - protein, 208 aa, Artificial Sequence
  Sulfonylurea responsive repressor L6-3G09
MGSRLDKSKVINSALELLNEVGIEGLTTRKLAQKLGVEQPTLYWHVKNKRALLDALAIEMMDRHQTHYCPLEGESWQDFLRNNAKSMRCALLSHRDGAKVCLGTRWTEQHYEAAENQLAFLCQQGFSLENALYAVSAVRVFTLGCVLFDQESQVAKEERETPTTASMPPLVRQVWELKDHQGAEPAFLFGLELIICGLEKQLKCESGS

SEQ ID NO: 94 - protein, 208 aa, Artificial Sequence
  Sulfonylurea responsive repressor L6-3H02
MGSRLDKSKVINSALELLNEVGIEGLTTRKLAQKLGVEQPTLYWHVKNKRALLDALAIEMMDRHATHYCPLEGESWQDFLRNTAKSMRCALLSHRDGAKVCLGTRWTEQHYESAENMLAFLCQQGFSLENALYAVSAVRVFTLGCVLFDQESQVAKEERETPTTASMPPLVRQAWELKVHQGAEPAFLFGLELIICGLEKQLKCESGS

SEQ ID NO: 95 - protein, 208 aa, Artificial Sequence
  Sulfonylurea responsive repressor L6-3H05
MGSRLDKSKVINSALELLNEVGIEGLTTRKLAQKLGVEQPTLYWHVKNKRALLDALAIEMMDRHATHYCPLEGESWQDFLRNNAKSMRCALLSHRDGAKVCLGTRWTEQHYESAENQLAFLCQQGFSLENALYAVSAVRVFTLGCVLFDQELQVAKEERETPTTASMPPLLRQVWELKDHQGAEPAFLFGLELIICGLEKQLKCESGS

SEQ ID NO: 96 - protein, 208 aa, Artificial Sequence
  Sulfonylurea responsive repressor L6-3H08
MGSRLDKSKVINSALELLNEVGIEGLTTRKLAQKLGVEQPTLYWHVKNKRALLDALAIEMMDRHATHYCPLEGESWQDFLRNTAKSMRCALLSHRDGAKVCLGTRWTEKQYEAAENQLAFLCQQGFSLENALYAVSAVGNFTLGCVLFDQELQVAKEERETPTTASMPPLVRQALELKDHQGAEPAFLFGLELIICGLEKQLKCESGS

SEQ ID NO: 97 - protein, 208 aa, Artificial Sequence
  Sulfonylurea responsive repressor L6-4A01
MGSRLDKSKVINSALELLNEVGIEGLTTRKLAQKLGVEQPTLYWHVKNKRALLDALAIEMMDRHATHYCPLEGESWQDFLRNTAKSMRCALLSHRDGAKVCLGTRWTEQQYETAENQLAFLCQQGFSLENALYAMSAVRNFTLGCVLFDQESQVAKEERETPTTASMPPLLRQAWELKDHQGAEPAFLFGLELIICGLEKQLKCESGS

SEQ ID NO: 98 - protein, 208 aa, Artificial Sequence
  Sulfonylurea responsive repressor L6-4A03
  misc_feature (67)..(67): Xaa can be any naturally occurring amino acid
  misc_feature (105)..(105): Xaa can be any naturally occurring amino acid
  misc_feature (123)..(123): Xaa can be any naturally occurring amino acid
  misc_feature (138)..(138): Xaa can be any naturally occurring amino acid
  misc_feature (146)..(146): Xaa can be any naturally occurring amino acid
  misc_feature (153)..(153): Xaa can be any naturally occurring amino acid
  misc_feature (181)..(181): Xaa can be any naturally occurring amino acid
MGSRLDKSKVINSALELLNEVGIEGLTTRKLAQKLGVEQPTLYWHVKNKRALLDALAIEMMDRHATXYCPLEGESWQDFLRNNAKSMRCALLSHRDGAKVCLGTXWTEKHYETAENQLAFLCXQGFSLENALYAMSAXRVFTLGCXLFDQELXVAKEERETPTTASMPPLLRQGWELKDHXGAEPAFLFGLELIICGLEKQLKCESGS

SEQ ID NO: 99 - protein, 208 aa, Artificial Sequence
  Sulfonylurea responsive repressor L6-4A04
  misc_feature (105)..(105): Xaa can be any naturally occurring amino acid
MGSRLDKSKVINSALELLNEVGIEGLTTRKLAQKLGVEQPTLYWHVKNKRALLDALAIEMMDRHQTHLCPLEGESWQDFLRNTAKSMRCALLSHRDGAKVCLGTXWTEKMYESAENMLAFLCQQGFSLENALYAVSAVRVFTLGCVLFDQELQVAKEERETPTTASMPPLLRQVWELKDHQGAEPAFLFGLELIICGLEKQLKCESGS

SEQ ID NO: 100 - protein, 208 aa, Artificial Sequence
  Sulfonylurea responsive repressor L6-4A09
  misc_feature (164)..(165): Xaa can be any naturally occurring amino acid
  misc_feature (168)..(168): Xaa can be any naturally occurring amino acid
MGSRLDKSKVINSALELLNEVGIEGLTTRKLAQKLGVEQPTLYWHVKNKRALLDALAIEMMDRHQTHMCPLEGESWQDFLRNNAKSMRCALLSHRDGAKVCLGTRWTEKMYESAENMLAFLCQQGFSLENALYAMSAVRVFTLGCVLFDQESQVAKEERETPTXXSMXPLVRQAWELKDHQGAEPAFLFGLELIICGLEKQLKCESGS

SEQ ID NO: 101 - protein, 208 aa, Artificial Sequence
  Sulfonylurea responsive repressor L6-4A10
MGSRLDKSKVINSALELLNEVGIEGLTTRKLAQKLGVEQPTLYWHVKNKRALLDALAIEMMDRHATHICPLEGESWQDFLRNTAKSMRCALLSHRDGAKVCLGTRWTEQHYESAENQLAFLCQQGFSLENALYAVSAVRVFTLGCVLFDQESQVAKEERETPTTASMPPLLRQVWELKDHQGAEPAFLFGLELIICGLEKQLKCESGS

SEQ ID NO: 102 - protein, 208 aa, Artificial sequence
  Sulfonylurea responsive repressor L6-4A11
  misc_feature (101)..(101): Xaa can be any naturally occurring amino acid
  misc_feature (110)..(110): Xaa can be any naturally occurring amino acid
  misc_feature (113)..(113): Xaa can be any naturally occurring amino acid
  misc_feature (135)..(135): Xaa can be any naturally occurring amino acid
  misc_feature (171)..(171): Xaa can be any naturally occurring amino acid
  misc_feature (174)..(174): Xaa can be any naturally occurring amino acid
MGSRLDKSKVINSALELLNEVGIEGLTTRKLAQKLGVEQPTLYWHVKNKRALLDALAIEMMDRHQTHYCPLEGESWQDFLRNTAKSMRCALLSHRDGAKVXLGTRWTEKXYEXAENQLAFLCQQGFSLENALYAXSAVRVFTLGCVLFDQESQVAKEERETPTTASMPPLXRQXWELKDHQGAEPAFLFGLELIICGLEKQLKCESGS

SEQ ID NO: 103 - protein, 208 aa, Artificial Sequence
  Sulfonylurea responsive repressor L6-4B05
  misc_feature (65)..(65): Xaa can be any naturally occurring amino acid
  misc_feature (68)..(68): Xaa can be any naturally occurring amino acid
  misc_feature (140)..(140): Xaa can be any naturally occurring amino acid
  misc_feature (167)..(167): Xaa can be any naturally occurring amino acid
  misc_feature (174)..(174): Xaa can be any naturally occurring amino acid
MGSRLDKSKVINSALELLNEVGIEGLTTRKLAQKLGVEQPTLYWHVKNKRALLDALAIEMMDRHXTHXCPLEGESWQDFLRNTAKSMRCALLSHRDGAKVCLGTRWTEQHYEAAENLLAFLCQQGFSLENALYAMSAVRXFTLGCVLFDQELQVAKEERETPTTASXPPLVRQXWELKDHQGAEPAFLFGLELIICGLEKQLKCESGS

SEQ ID NO: 104 - protein, 208 aa, Artificial Sequence
  Sulfonylurea responsive repressor L6-4B06
MGSRLDKSKVINSALELLNEVGIEGLTTRKLAQKLGVEQPTLYWHVKNKRALLDALAIEMMDRHATHVCPLEGESWQDFLRNNAKSMRCALLSHRDGAKVCLGTRWTEQQYETAENMLAFLCQQGFSLENALYAVSAVRNFTLGCVLFDQESQVAKEERETPTTASMPPLLRQGWELKDHQGAEPAFLFGLELIICGLEKQLKCESGS

SEQ ID NO: 105 - protein, 208 aa, Artificial Sequence
  Sulfonylurea responsive repressor L6-4B07
MGSRLDKSKVINSALELLNEVGIEGLTTRKLAQKLGVEQPTLYWHVKNKRALLDALAIEMMDRHATHYCPLEGESWQDFLRNNAKSMRCALLSHRDGAKVCLGTRWTEQHYETAENMLAFLCQQGFSLENALYAVSAVRNFTLGCVLFDQELQVAKEERETPTTASMPPLVRQAWELKDHQGAEPAFLFGLELIICGLEKQLKCESGS

SEQ ID NO: 106 - protein, 208 aa, Artificial Sequence
  Sulfonylurea responsive repressor L6-4B08
MGSRLDKSKVINSALELLNEVGIEGLTTRKLAQKLGVEQPTLYWHVKNKRALLDALAIEMMDRHQTHFCPLEGESWQDFLRNNAKSMRCALLSHRDGAKVCLGTRWTEQMYETAENMLAFLCQQGFSLENALYAMSAVRVFTLGCVLFDQESQVAKEERETPTTASMPPLVRQGWELKDHQGAEPAFLFGLELIICGLEKQLKCESGS

SEQ ID NO: 107 - protein, 208 aa, Artificial Sequence
  Sulfonylurea responsive repressor L6-4B12
  misc_feature (156)..(156): Xaa can be any naturally occurring amino acid
  misc_feature (163)..(163): Xaa can be any naturally occurring amino acid
  misc_feature (167)..(167): Xaa can be any naturally occurring amino acid
MGSRLDKSKVINSALELLNEVGIEGLTTRKLAQKLGVEQPTLYWHVKNKRALLDALAIEMMDRHATDYCPLEGESWQDFLRNNAKSMRCALLSHRDGAKVCLGTRWTEKQYETAENMLAFLCQQGFSLENALYAVSAVRVFTLGCVLFDQESQVAXEERETPXTASXPPLVRQVWELKDHQGAEPAFLFGLELIICGLEKQLKCESGS

SEQ ID NO: 108 - protein, 208 aa, Artificial Sequence
  Sulfonylurea responsive repressor L6-4C01
MGSRLDKSKVINSALELLNEVGIEGLTTRKLAQKLGVEQPTLYWHVKNKRALLDALAIEMMDRHQTHYCPLEGESWQDFLRNNAKSMRCALLSHRDGAKVCLGTRWTEQLYETAENQLAFLCQQGFSLENALYAMSAVRVFTLGCVLFDQESQVAKEERETPTTASMPPLVRQAWELKDHQGAEPAFLFGLELIICGLEKQLKCESGS

SEQ ID NO: 109 - protein, 208 aa, Artificial Sequence
  Sulfonylurea responsive repressor L6-4C03
  misc_feature (134)..(134): Xaa can be any naturally occurring amino acid
MGSRLDKSKVINSALELLNEVGIEGLTTRKLAQKLGVEQPTLYWHVKNKRALLDALAIEMMDRHQTHVCPLEGESWQDFLRNNAKSMRCALLSHRDGAKVCLGTRWTEQHYEAAENMLAFLCQQGFSLENALYXMSAVRVFTLGCVLFDQELQVAKEERETPTTASMPPLVRQAWELKDHQGAEPAFLFGLELIICGLEKQLKCESGS

SEQ ID NO: 110 - protein, 208 aa, Artificial Sequence
  Sulfonylurea responsive repressor L6-4C04
MGSRLDKSKVINSALELLNEVGIEGLTTRKLAQKLGVEQPTLYWHVKNKRALLDALAIEMMDRHQTHFCPLEGESWQDFLRNNAKSMRCALLSHRDGAKVCLGTRWTEQQYESAENQLAFLCQQGFSLENALYAMSAVRVFTLGCVLFDQESQVAKEERETPTTASMPPLLRQGLELKDHQGAEPAFLFGLELIICGLEKQLKCESGS

SEQ ID NO: 111 - protein, 208 aa, Artificial Sequence
  Sulfonylurea responsive repressor L6-4C07
MGSRLDKSKVINSALELLNEVGIEGLTTRKLAQKLGVEQPTLYWHVKNKRALLDALAIEMMDRHQTHLCPLEGESWQDFLRNNAKSMRCALLSHRDGAKVCLGTRWTEQLYETAENMLAFLCQQGFSLENALYAMSAVRVFTLGCVLFDQESQVAKEERETPTTASMPPLLRQGWELKDHQGAEPAFLFGLELIICGLEKQLKCESGS

SEQ ID NO: 112 - protein, 208 aa, Artificial Sequence
  Sulfonylurea responsive repressor L6-4C08
MGSRLDKSKVINSALELLNEVGIEGLTTRKLAQKLGVEQPTLYWHVKNKRALLDALAIEMMDRHQTHYCPLEGESWQDFLRNTAKSMRCALLSHRDGAKVCLGTRWTEKLYETAENMLAFLCQQGFSLENALYAMSAVRVFTLGCVLFDQESQVAKEERETPTTASMPPLLRQAWELKDHQGAEPAFLFGLELIICGLEKQLKCESGS

SEQ ID NO: 113 - protein, 208 aa, Artificial Sequence
  Sulfonylurea responsive repressor L6-4C09
MGSRLDKSKVINSALELLNEVGIEGLTTRKLAQKLGVEQPTLYWHVKNKRALLDALAIEMMDRHQTHYCPLEGESWQDFLRNNAKSMRCALLSHRDGAKVCLGTRWTEKQYETAENMLAFLCQQGFSLENALYAMSAVRVFTLGCVLFDQELQVAKEERETPTTASMPPLLRQVWELKDHQGAEPAFLFGLELIICGLEKQLKCESGS

SEQ ID NO: 114 - protein, 208 aa, Artificial Sequence
  Sulfonylurea reponsive repressor L6-4C10
MGSRLDKSKVINSALELLNEVGIEGLTTRKLAQKLGVEQPTLYWHVKNKRALLDALAIEMMDRHQTHYCPLEGESWQDFLRNTAKSMRCALLSHRDGAKVCLGTRWTEQMYESAENQLAFLCQQGFSLENALYAVSAVRVFTLGCVLFDQELQVAKEERETPTTASMPPLLRQAWELKDHQGAEPAFLFGLELIICGLEKQLKCESGS

SEQ ID NO: 115 - protein, 208 aa, Artificial Sequence
  Sulfonylurea responsive repressor L6-4C11
MGSRLDKSKVINSALELLNEVGIEGLTTRKLAQKLGVEQPTLYWHVKNKRALLDALAIEMMDRHQTHYCPLEGESWQDFLRNTAKSMRCALLSHRDGAKVCLGTRWTEKQYETAENMLAFLCQQGFSLENALYAMSAVRVFTLGCVLFDQESQVAKEERETPTTASMPPLLRQGWELKDHQGAEPAFLFGLELIICGLEKQLKCESGS

SEQ ID NO: 116 - protein, 208 aa, Artificial Sequence; identical to SEQ ID NO: 88
  Sulfonylurea responsive repressor L6-4D09

SEQ ID NO: 117 - protein, 208 aa, Artificial Sequence
  Sulfonylurea responsive repressor L6-4D10
MGSRLDKSKVINSALELLNEVGIEGLTTRKLAQKLGVEQPTLYWHVKNKRALLDALAIEMMDRHQTHYCPLEGESWQDFLRNNAKSMRCALLSHRDGAKVCLGTRWTEKQYESAENMLAFLCQQGFSLENALYAVSAVRVFTLGCVLFDQESQVAKEERETPTTASMPPLLRQAWELKDHQGAEPAFLFGLELIICGLEKQLKCESGS

SEQ ID NO: 118 - protein, 208 aa, Artificial Sequence
  Sulfonylurea responsive repressor L6-4E01
MGSRLDKSKVINSALELLNEVGIEGLTTRKLAQKLGVEQPTLYWHVKNKRALLDALAIEMMDRHQTHLCPLEGESWQDFLRNNAKSMRCALLSHRDGAKVCLGTRWTEQLYESAENQLAFLCQQGFSLENALYAVSAVRVFTLGCVLFDQESQVAKEERETPTTASMPPLLRQAWELKDHQGAEPAFLFGLELIICGLEKQLKCESGS

SEQ ID NO: 119 - protein, 208 aa, Artificial Sequence
  Sulfonylurea responsive repressor L6-4E02
MGSRLDKSKVINSALELLNEVGIEGLTTRKLAQKLGVEQPTLYWHVKNKRALLDALAIEMMDRHATHLCPLEGESWQDFLRNNAKSMRCALLSHRDGAKVCLGTRWTEKQYETAENMLAFLCQQGFSLENALYAVSAVRVFTLGCVLFDQESQVAKEERETPTTASMPPLLRQVWELKDHQGAEPAFLFGLELIICGLEKQLKCESGS

SEQ ID NO: 120 - protein, 208 aa, Artificial Sequence
  Sulfonylurea responsive repressor L6-4E03
  misc_feature (165)..(165): Xaa can be any naturally occurring amino acid
  misc_feature (167)..(167): Xaa can be any naturally occurring amino acid
MGSRLDKSKVINSALELLNEVGIEGLTTRKLAQKLGVEQPTLYWHVKNKRALLDALAIEMMDRHATHFCPLEGESWQDFLRNNAKSMRCALLSHRDGAKVCVGTRWTEQMYEAAENQLAFLCQQGFSLENALYAVSAVRVFTLGCVLFDQELQVAKEERETPTTXSXPPLVRQAWELKDHQGAEPAFLFGLELIICGLEKQLKCESGS

SEQ ID NO: 121 - protein, 208 aa, Artificial Sequence
  Sulfonylurea responsive repressor L6-4E05
MGSRLDKSKVINSALELLNEVGIEGLTTRKLAQKLGVEQPTLYWHVKNKRALLDALAIEMMDRHQTHICPLEGESWQDFLRNNAKSMRCALLSHRDGAKVCVGTRWTEKHYESAENMLAFLCQQGFSLENALYAVSAVRVFTLGCVLFDQESQVAKEERETPTTASMPPLLRQAWELKDHQGAEPAFLFGLELIICGLEKQLKCESGS

SEQ ID NO: 122 - protein, 208 aa, Artificial Sequence
  Sulfonylurea responsive repressor L6-4E08
  misc_feature (101)..(101): Xaa can be any naturally occurring amino acid
  misc_feature (117)..(117): Xaa can be any naturally occurring amino acid
  misc_feature (140)..(140): Xaa can be any naturally occurring amino acid
  misc_feature (152)..(152): Xaa can be any naturally occurring amino acid
  misc_feature (175)..(175): Xaa can be any naturally occurring amino acid
MGSRLDKSKVINSALELLNEVGIEGLTTRKLAQKLGVEQPTLYWHVKNKRALLDALAIEMMDRHATHFCPLEGESWQDFLRNNAKSMRCALLSHRDGAKVXLGTRWTEQLYETAENXLAFLCQQGFSLENALYAMSAVRXFTLGCVLFDQEXQVAKEERETPTTASMPPLLRQVXELKDHQGAEPAFLFGLELIICGLEKQLKCESGS

SEQ ID NO: 123 - protein, 208 aa, Artificial Sequence
  Sulfonylurea responsive repressor L6-4E09
MGSRLDKSKVINSALELLNEVGIEGLTTRKLAQKLGVEQPTLYWHVKNKRALLDALAIEMMDRHATHVCPLEGESWQDFLRNTAKSMRCALLSHRDGAKVCLGTRWTEQHYETAENMLAFLCQQGFSLENALYAMSAVRVFTLGCVLFDQESQVAKEERETPTTASMPPLLRQVWELKDHQGAEPAFLFGLELIICGLEKQLKCESGS

SEQ ID NO: 124 - protein, 208 aa, Artificial Sequence
  Sulfonylurea responsive repressor L6-4E11
  misc_feature (68)..(68): Xaa can be any naturally occurring amino acid
  misc_feature (140)..(140): Xaa can be any naturally occurring amino acid
  misc_feature (171)..(171): Xaa can be any naturally occurring amino acid
MGSRLDKSKVINSALELLNEVGIEGLTTRKLAQKLGVEQPTLYWHVKNKRALLDALAIEMMDRHPTHXCPLEGESWQDFLRNTAKSMRCALLSHRDGAKVCLGTRWTEQLYETAENMLAFLCQQGFSLENALYAMSAVRXFTLGCVLFDQEIQVAKEERETPTTASMPPLXRQAWELKDHQGAEPAFLFGLELIICGLEKQLKCESGS

SEQ ID NO: 125 - protein, 208 aa, Artificial Sequence
  Sulfonylurea responsive repressor L6-4E12
  misc_feature (135)..(135): Xaa can be any naturally occurring amino acid
  misc_feature (152)..(152): Xaa can be any naturally occurring amino acid
  misc_feature (171)..(171): Xaa can be any naturally occurring amino acid
  misc_feature (174)..(174): Xaa can be any naturally occurring amino acid
MGSRLDKSKVINSALELLNEVGIEGLTTRKLAQKLGVEQPTLYWHVKNKRALLDALAIEMMDRHATHYCPLEGESWQDFLRNTAKSMRCALLSHRDGAKVCLGTRWTEKLYETAENMLAFLCQQGFSLENALYAXSAVRVFTLGCVLFDQEXQVAKEERETPTTASMPPLXRQXWELKDHQGAEPAFLFGLELIICGLEKQLKCESGS

SEQ ID NO: 126 - protein, 208 aa, Artificial Sequence
  Sulfonylurea responsive repressor L6-4F01
  misc_feature (151)..(151): Xaa can be any naturally occurring amino acid
  misc_feature (164)..(164): Xaa can be any naturally occurring amino acid
  misc_feature (168)..(168): Xaa can be any naturally occurring amino acid
MGSRLDKSKVINSALELLNEVGIEGLTTRKLAQKLGVEQPTLYWHVKNKRALLDALAIEMMDRHATHLCPLEGESWQDFLRNTAKSMRCALLSHRDGAKVCLGTRWTEQLYETAENMLAFLCQQGFSLENALYAVSAVRVFTLGCVLFDQXLQVAKEERETPTXASMXPLVRQGWELKDHQGAEPAFLFGLELIICGLEKQLKCESGS

SEQ ID NO: 127 - protein, 208 aa, Artificial Sequence
  Sulfonylurea responsive repressor L6-4F10
  misc_feature (140)..(140): Xaa can be any naturally occurring amino acid
  misc_feature (152)..(152): Xaa can be any naturally occurring amino acid
MGSRLDKSKVINSALELLNEVGIEGLTTRKLAQKLGVEQPTLYWHVKNKRALLDALAIEMMDRHQTHYCPLEGESWQDFLRNNAKSMRCALLSHRDGAKVWLGTRWTEQLYEAAENLLAFLCQQGFSLENALYAVSAVRXFTLGCVLFDQEXQVAKEERETPTTASMPPLLRQAWELKDHQGAEPAFLFGLELIICGLEKQLKCESGS

SEQ ID NO: 128 - protein, 208 aa, Artificial Sequence
  Sulfonylurea responsive repressor L6-4F12
  misc_feature (167)..(167): Xaa can be any naturally occurring amino acid
MGSRLDKSKVINSALELLNEVGIEGLTTRKLAQKLGVEQPTLYWHVKNKRALLDALAIEMMDRHQTHYCPLEGESWQDFLRNNAKSMRCALLSNRDGAKVCLGTRWTEKLYEAAENQLAFLCQQGFSLENALYAVSAVRVFTLGCVLFDQELQVAKEERETPTTASXPPLVRQAWELKDHQGAEPAFLFGLELIICGLEKQLKCESGS

SEQ ID NO: 129 - protein, 208 aa, Artificial Sequence
  Sulfonylurea responsive repressor L6-4G02
MGSRLDKSKVINSALELLNEVGIEGLTTRKLAQKLGVEQPTLYWHVKNKRALLDALAIEMMDRHATHYCPLEGESWQDFLRNTAKSMRCALLSHRDGAKVCLGTRWTEQLYETAENQLAFLCQQGFSLENALYAVSAVRVFTLGCVLFDQELQVAKEERETPTTASMPPLLRQAWELKDHQGAEPAFLFGLELIICGLEKQLKCESGS

SEQ ID NO: 130 - protein, 208 aa, Artificial Sequence
  Sulfonylurea responsive repressor L6-4G03
MGSRLDKSKVINSALELLNEVGIEGLTTRKLAQKLGVEQPTLYWHVKNKRALLDALAIEMMDRHQTHYCPLEGESWQDFLRNNAKSMRCALLSHRDGAKVCLGTRWTEKHYEGAENQLAFLCQQGFSLENALYAMSAVRVFTLGCVLFDQESQVAKEERETPTTASMPPLVRQVWELKDHQGAEPAFLFGLELIICGLEKQLKCESGS

SEQ ID NO: 131 - protein, 208 aa, Artificial Sequence
  Sulfonylurea responsive repressor L6-4G06
MGSRLDKSKVINSALELLNEVGIEGLTTRKLAQKLGVEQPTLYWHVKNKRALLDALAIEMMDRHQTHMCPLEGESWQDFLRNNAKSMRCALLSHRDGAKVCLGTRWTEKHYETAENQLAFLCQQGFSLENALYAVSAVRVFTLGCVLFDQELQVAKEERETPTTASMPPLVRQAWELKDHQGAEPAFLFGLELIICGLEKQLKCESGS

SEQ ID NO: 132 - protein, 208 aa, Artificial Sequence
  Sulfonylurea responsive repressor L6-4G07
MGSRLDKSKVINSALELLNEVGIEGLTTRKLAQKLGVEQPTLYWHVKNKRALLDALAIEMMDRHATHLCPLEGESWQDFLRNNAKSMRCALLSHRDGAKVCLGTRWTEQQYETAENMLAFLCQQGFSLENALYAVSAVRNFTLGCVLFDQESQVAKEERETPTTASMPPLLRQAWELKDHQGAEPAFLLGLELIICGLEKQLKCESGS

SEQ ID NO: 133 - protein, 208 aa, Artificial Sequence
  Sulfonylurea responsive repressor L6-4G08
  misc_feature (152)..(152): Xaa can be any naturally occurring amino acid
MGSRLDKSKVINSALELLNEVGIEGLTTRKLAQKLGVEQPTLYWHVKNKRALLDALAIEMMDRHPTHYCPLEGESWQDFLRNNAKSMRCALLSHRDGAKVCLGTRWTEQQYETAENQLAFLCQQGFSLENALYAMSAVRNFTLGCVLFDQEXQVAKEERETPTTASMPPLLRQAWELKDHQGAEPAFLFGLELIICGLEKQLKCESGS

SEQ ID NO: 134 - protein, 208 aa, Artificial Sequence
  Sulfonylurea responsive repressor L6-4G10
MGSRLDKSKVINSALELLNEVGIEGLTTRKLAQKLGVEQPTLYWHVKNKRALLDALAIEMMDRHQTHFCPLEGESWQDFLRNTAKSMRCALLSHRDGAKVCLGTRWTEQQYETAENMLAFLCQQGFSLENALYAVSAVRVFTLGCVLFDQESQVAKEERETPTTASMPPLARQAWELKDHQGAEPAFLFGLELIICGLEKQLKCESGS

SEQ ID NO: 135 - protein, 208 aa, Artificial Sequence
  Sulfonylurea responsive repressor L6-4H07
MGSRLDKSKVINSALELLNEVGIEGLTTRKLAQKLGVEQPTLYWHVKNKRALLDALAIEMMDRHQTHVCPLEGESWQDFLRNNAKSMRCALLSHRDGAKVCLGTRWTEQMYETAENQLAFLCQQGFSLENALYAVSAVRVFTLGCVLFDQESQVAKEERETPTTASMPPLLRQAWELKDHQGAEPAFLFGLELIICGLEKQLKCESGS

SEQ ID NO: 136 - protein, 208 aa, Artificial Sequence
  Sulfonylurea responsive repressor L6-5A02
MGSRLDKSKVINSALELLNEVGIEGLTTRKLAQKLGVEQPTLYWHVKNKRALLDALAIEMMDRHATHYCPLEGESWQDFLRNTAKSMRCALLSHRDGAKVCLGTRWTEQLYETAENQLAFLCQQGFSLENALYAMSAVRVFTLGCVLFDQESQVAKEERETPTTASMPPLLRQAWELKDHQGAEPAFLFGLELIICGLEKQLKCESGS

SEQ ID NO: 137 - protein, 208 aa, Artificial Sequence
  Sulfonylurea responsive repressor L6-5A03
MGSRLDKSKVINSALELLNEVGIEGLTTRKLAQKLGVEQPTLYWHVKNKRALLDALAIEMMDRHATHYCPLEGESWQDFLRNNAKSMRCALLSHRDGAKVCLGTRWTEQLYETAENMLAFLCQQGFSLENALYAMSAVRVFTLGCVLFDQESQVAKEERETPTTASMPPLVRQGWELKDHQGAEPAFLFGLELIICGLEKQLKCESGS

SEQ ID NO: 138 - protein, 208 aa, Artificial Sequence
  Sulfonylurea responsive repressor L6-5A04
MGSRLDKSKVINSALELLNEVGIEGLTTRKLAQKLGVEQPTLYWHVKNKRALLDALAIEMMDRHQTHYCPLEGESWQDFLRNNAKSMRCALLSHRDGAKVWLGTRWTEKQYESAENMLAFLCQQGFSLENALYAVSAVRVFTLGCVLFDQELQVAKEERETPTTASMPPLVRQAWELKDHQGAEPAFLFGLELIICGLEKQLKCESGS

SEQ ID NO: 139 - protein, 208 aa, Artificial Sequence
  Sulfonylurea responsive repressor L6-5A05
MGSRLDKSKVINSALELLNEVGIEGLTTRKLAQKLGVEQPTLYWHVKNKRALLDALAIEMMDRHQTHMCPLEGESWQDFLRNTAKSMRCALLSHRDGAKVCLGTRWTEQMYEAAENQLAFLCQQGFSLENALYAMSAVRVFTLGCVLFDQESQVAKEERETPTTASMPPLVRQVWELKDHQGAEPAFLFGLELIICGLEKQLKCESGS

SEQ ID NO: 140 - protein, 208 aa, Artificial Sequence
  Sulfonylurea responsive repressor L6-5A06
MGSRLDKSKVINSALELLNEVGIEGLTTRKLAQKLGVEQPTLYWHVKNKRALLDALAIEMMDRHQTHYCPLEGESWQDFLRNTAKSMRCALLSHRDGAKVCLGTRWTEQMYETAENQLAFLCQQGFSLENALYAMSAVRVFTLGCVLFDQESQVAKEERETPTTASMPPLLRQVWELKDHQGAEPAFLFGLELIICGLEKQLKCESGS

SEQ ID NO: 141 - protein, 208 aa, Artificial Sequence
  Sulfonylurea responsive repressor L6-5A07
  misc_feature (109)..(109): Xaa can be any naturally occurring amino acid
  misc_feature (113)..(113): Xaa can be any naturally occurring amino acid
MGSRLDKSKVINSALELLNEVGIEGLTTRKLAQKLGVEQPTLYWHVKNKRALLDALAIEMMDRHQTHICPLEGESWQDFLRNTAKSMRCALLSHRDGAKVCLGTRWTEXQYEXAENMLAFLCQQGFSLENALYAMSAVRVFTLGCVLFDQELQVAKEERETPTTASMPPLVRQVWELKDHQGAEPAFLFGLELIICGLEKQLKCESGS

SEQ ID NO: 142 - protein, 208 aa, Artificial Sequence
  Sulfonylurea responsive repressor L6-5A09
MGSRLDKSKVINSALELLNEVGIEGLTTRKLAQKLGVEQPTLYWHVKNKRALLDALAIEMMDRHQTHMCPLEGESWQDFLRNNAKSMRCALLSHRDGAKVCLGTRWTEQHYEAAENQLAFLCQQGFSLENALYAMSAVRVFTLGCVLFDQESQVAKEERETPTTASMPPLVRQAWELKDHQGAEPAFLFGLELIICGLEKQLKCESGS

SEQ ID NO: 143 - protein, 208 aa, Artificial Sequence
  Sulfonylurea responsive repressor L6-5A10
  misc_feature (135)..(135): Xaa can be any naturally occurring amino acid
  misc_feature (171)..(171): Xaa can be any naturally occurring amino acid
MGSRLDKSKVINSALELLNEVGIEGLTTRKLAQKLGVEQPTLYWHVKNKRALLDALAIEMMDRHATHYCPLEGESWQDFLRNTAKSMRCALLSHRDGAKVCLGTRWTEQHYETAENQLAFLCQQGFSLENALYAXSAVRVFTLGCVLFDQELQVAKEERETPTTASMPPLXRQVWELKDHQGAEPAFLFGLELIICGLEKQLKCESGS

SEQ ID NO: 144 - protein, 208 aa, Artificial Sequence
  Sulfonylurea responsive repressor L6-5B02
  misc_feature (68)..(68): Xaa can be any naturally occurring amino acid
  misc_feature (113)..(113): Xaa can be any naturally occurring amino acid
  misc_feature (139)..(139): Xaa can be any naturally occurring amino acid
MGSRLDKSKVINSALELLNEVGIEGLTTRKLAQKLGVEQPTLYWHVKNKRALLDALAIEMMDRHQTHXCPLEGESWQDFLRNTAKSMRCALLSHRDGAKVCLGTRWTEQLYEXAENQLAFLCQQGFSLENALYAMSAVXVFTLGCVLFDQELQVAKEERETPTTASMPPLSRQVWELKDHQGAEPAFLFGLELIICGLEKQLKCESGS

SEQ ID NO: 145 - protein, 208 aa, Artificial Sequence
  Sulfonylurea responsive repressor L6-5B07
MGSRLDKSKVINSALELLNEVGIEGLTTRKLAQKLGVEQPTLYWHVKNKRALLDALAIEMMDRHATHICPLEGESWQDFLRNNAKSMRCALLSHRDGAKVCLGTRWTEQQYEAAENMLAFLCQQGFSLENALYAMSAVRVFTLGCVLFDQELQVAKEERETPTTASMPPLLRQVWELKDHQGAEPAFLFGLELIICGLEKQLKCESGS

SEQ ID NO: 146 - protein, 208 aa, Artificial Sequence
  Sulfonylurea responsive repressor L6-5B08
MGSRLDKSKVINSALELLNEVGIEGLTTRKLAQKLGVEQPTLYWHVKNKRALLDALAIEMMDRHQTHICPLEGESWQDFLRNNAKSMRCALLSHRDGAKVCLGTRWTEQQYETAENQLAFLCQQGFSLENALYAMSAVRVFTLGCVLFDQESQVAKEERETPTTASMPPLVRQGWELKDHQGAEPAFLFGLELIICGLEKQLKCESGS

SEQ ID NO: 147 - protein, 208 aa, Artificial Sequence
  Sulfonylurea responsive repressor L6-5B11
MGSRLDKSKVINSALELLNEVGIEGLTTRKLAQKLGVEQPTLYWHVKNKRALLDALAIEMMDRHQTHVCPLEGESWQDFLRNNAKSMRCALLSHRDGAKVCLGTRWTEQQYESAENMLAFLCQQGFSLENALYAMSAVRVFTLGCVLFDQESQVAKEERETPTTASMPPLLRQVLELKDHQGAEPAFLFGLELIICGLEKQLKCESGS

SEQ ID NO: 148 - protein, 208 aa, Artificial Sequence
  Sulfonylurea responsive repressor L6-5C01
MGSRLDKSKVINSALELLNEVGIEGLTTRKLAQKLGVEQPTLYWHVKNKRALLDALAIEMMDRHATNYCPLEGESWQDFLRNTAKSMRCALLSHRDGAKVCLGTRWTEQQYETAENMLAFLCQQGFSLENALYAVSAVRVFTLGCVLFDQELQVAKEERETPTTASMPPLLRQVWELKDHQGAEPAFLFGLELIICGLEKQLKCESGS

SEQ ID NO: 149 - protein, 208 aa, Artificial Sequence
  Sulfonylurea responsive repressor L6-5C02
MGSRLDKSKVINSALELLNEVGIEGLTTRKLAQKLGVEQPTLYWHVKNKRALLDALAIEMMDRHQTHFCPLEGESWQDFLRNTAKSMRCALLSHRDGAKVWLGTRWTEKQYETAENQLAFLCQQGFSLENALYAVSAVRVFTLGCVLFDQELQVAKEERETPTTASMPPLLRQAWELKDHQGAEPAFLFGLELIICGLEKQLKCESGS

SEQ ID NO: 150 - protein, 208 aa, Artificial Sequence
  Sulfonylurea responsive repressor L6-5C04
  misc_feature (109)..(110): Xaa can be any naturally occurring amino acid
  misc_feature (113)..(113): Xaa can be any naturally occurring amino acid
  misc_feature (139)..(140): Xaa can be any naturally occurring amino acid
  misc_feature (171)..(171): Xaa can be any naturally occurring amino acid
  misc_feature (174)..(174): Xaa can be any naturally occurring amino acid
MGSRLDKSKVINSALELLNEVGIEGLTTRKLAQKLGVEQPTLYWHVKNKRALLDALAIEMMDRHQTHYCPLEGESWQDFLRNTAKSMRCALLSHRDGAKVCLGTRWTEXXYEXAENQLAFLCQQGFSLENALYAMSAVXXFTLGCVLFDQESQVAKEERETPTTASMPPLXRQXWELKDHQGAEPAFLFGLELIICGLEKQLKCESGS

SEQ ID NO: 151 - protein, 208 aa, Artificial Sequence
  Sulfonylurea responsive repressor L6-5C08
MGSRLDKSKVINSALELLNEVGIEGLTTRKLAQKLGVEQPTLYWHVKNKRALLDALAIEMMDRHQTHYCPLEGESWQDFLRNNAKSMRCALLSHRDGAKVCLGTRWTEQLYETAENMLAFLCQQGFSLENALYAMSAVRVFTLGCVLFDQESQVAKEERETPTTASMPPLLRQVWELKDHQGAEPAFLFGLELIICGLEKQLKCESGS

SEQ ID NO: 152 - protein, 208 aa, Artificial Sequence
  Sulfonylurea responsive repressor L6-5C10
MGSRLDKSKVINSALELLNEVGIEGLTTRKLAQKLGVEQPTLYWHVKNKRALLDALAIEMMDRHATHLCPLEGESWQDFLRNTAKSMRCALLSHRDGAKVCLGTRWTEQQYEAAENMLAFLCQQGFSLENALYAMSAVRVFTLGCVLFDQESQVAKEERETPTTASMPPLLRQVWELKDHQGAEPAFLFGLELIICGLEKQLKCESGS

SEQ ID NO: 153 - protein, 208 aa, Artificial Sequence
  Sulfonylurea responsive repressor L6-5C11
MGSRLDKSKVINSALELLNEVGIEGLTTRKLAQKLGVEQPTLYWHVKNKRALLDALAIEMMDRHQTHYCPLEGESWQDFLRNNAKSMRCALLSHRDGAKVCLGTRWTEKHYESAENMLAFLCQQGFSLENALYAMSAVRVFTLGCVLFDQELQVAKEERETPTTASMPPLLRQVWELKDHQGAEPAFLFGLELIICGLEKQLKCESGS

SEQ ID NO: 154 - protein, 208 aa, Artificial Sequence
  Sulfonylurea responsive repressor L6-5D04
MGSRLDKSKVINSALELLNEVGIEGLTTRKLAQKLGVEQPTLYWHVKNKRALLDALAIEMMDRHQTHYCPLEGESWQDFLRNNAKSMRCALLSHRDGAKVCLGTRWTEQHYETAENQLAFLCQQGFSLENALYAMSAVRVFTLGCVLFDQESQVAKEERETPTTASMPPLVRQGWELKDHQGAEPAFLFGLELIICGLEKQLKCESGS

SEQ ID NO: 155 - protein, 208 aa, Artificial Sequence
  Sulfonylurea responsive repressor L6-5D09
MGSRLDKSKVINSALELLNEVGIEGLTTRKLAQKLGVEQPTLYWHVKNKRALLDALAIEMMDRHATHYCPLEGESWQDFLRNNAKSMRCALLSHRDGAKVCLGTRWTEKQYEAAENQLAFLCQQGFSLENALYAVSAVRVFTLGCVLFDQESQVAKEERETPTTASMPPLLRQGWELKDHQGAEPAFLFGLELIICGLEKQLKCESGS

SEQ ID NO: 156 - protein, 208 aa, Artificial Sequence
  Sulfonylurea responsive repressor L6-5D11
MGSRLDKSKVINSALELLNEVGIEGLTTRKLAQKLGVEQPTLYWHVKNKRALLDALAIEMMDRHATHYCPLEGESWQDFLRNNAKSMRCALLSHRDGAKVCLGTRWTEQLYEAAENQLAFLCQQGFSLENALYAMSAVRVFTLGCVLFDQESQVAKEERETPTTASMPPLVRQVWELKDHQGAEPAFLFGLELIICGLEKQLKCESGS

SEQ ID NO: 157 - protein, 208 aa, Artificial Sequence; identical to SEQ ID NO: 17
  Sulfonylurea responsive repressor L6-5D12

SEQ ID NO: 158 - protein, 208 aa, Artificial Sequence
  Sulfonylurea responsive repressor L6-5E05
MGSRLDKSKVINSALELLNEVGIEGLTTRKLAQKLGVEQPTLYWHVKNKRALLDALAIEMMDRHQTHYCPLEGESWQDFLRNNAKSMRCALLSHRDGAKVCLGTRWTEKHYETAENMLAFLCQQGFSLENALYAVSAVRVFTLGCVLFDQELQVAKEERETPTTASMPPLLRQVWELKDHQGAEPAFLFGLELIICGLEKQLKCESGS

SEQ ID NO: 159 - protein, 208 aa, Artificial Sequence
  Sulfonylurea responsive repressor L6-5E09
  misc_feature (65)..(65): Xaa can be any naturally occurring amino acid
  misc_feature (110)..(110): Xaa can be any naturally occurring amino acid
  misc_feature (113)..(113): Xaa can be any naturally occurring amino acid
  misc_feature (135)..(135): Xaa can be any naturally occurring amino acid
  misc_feature (171)..(171): Xaa can be any naturally occurring amino acid
MGSRLDKSKVINSALELLNEVGIEGLTTRKLAQKLGVEQPTLYWHVKNKRALLDALAIEMMDRHXTHYCPLEGESWQDFLRNTAKSMRCALLSHRDGAKVWLGTRWTEQXYEXAENLLAFLCQQGFSLENALYAXSAVRNFTLGCVLFDQESQVAKEERETPTTASMPPLXRQGWELKDHQGAEPAFLFGLELIICGLEKQLKCESGS

SEQ ID NO: 160 - protein, 208 aa, Artificial Sequence
  Sulfonylurea responsive repressor L6-5F02
MGSRLDKSKVINSALELLNEVGIEGLTTRKLAQKLGVEQPTLYWHVKNKRALLDALAIEMMDRHQTHICPLEGESWQDFLRNTAKSMRCALLSHRDGAKVCLGTRWTEKHYEAAENMLAFLCQQGFSLENALYAVSAVRVFTLGCVLFDQESQVAKEERETPTTASMPPLVRQVWELKDHQGAEPAFLFGLELIICGLEKQLKCESGS

SEQ ID NO: 161 - protein, 208 aa, Artificial Sequence
  Sulfonylurea responsive repressor L6-5F04
MGSRLDKSKVINSALELLNEVGIEGLTTRKLAQKLGVEQPTLYWHVKNKRALLDALAIEMMDRHQTHYCPLEGESWQDFLRNNAKSMRCALLSHRDGAKVCLGTRWTEQLYESAENQLAFLCQQGFSLENALYAMSAVRVFTLGCVLFDQELQVAKEERETPTTASMPPLLRQGWELKDHQGAEPAFLFGLELIICGLEKQLKCESGS

SEQ ID NO: 162 - protein, 208 aa, Artificial Sequence
  Sulfonylurea responsive repressor L6-5F05
MGSRLDKSKVINSALELLNEVGIEGLTTRKLAQKLGVEQPTLYWHVKNKRALLDALAIEMMDRHATHICPLEGESWQDFLRNNAKSMRCALLSHRDGAKVCLGTRWTEQQYEAAENQLAFLCQQGFSLENALYAVSAVRVFTLGCVLFDQELQVAKEERETPTTASMPPLLRQAWELKDHQGAEPAFLFGLELIICGLEKQLKCESGS

SEQ ID NO: 163 - protein, 208 aa, Artificial Sequence
  Sulfonylurea responsive repressor L6-5F07
MGSRLDKSKVINSALELLNEVGIEGLTTRKLAQKLGVEQPTLYWHVKNKRALLDALAIEMMDRHATHYCPLEGESWQDFLRNNAKSMRCALLSHRDGAKVCLGTRWTEKQYETAENQLAFLCQQGFSLENALYAVSAVRVFTLGCVLFDQELQVAKEERETPTTASMPPLLRQVWELKDHQGAEPAFLFGLELIICGLEKQLKCESGS

SEQ ID NO: 164 - protein, 208 aa, Artificial Sequence
  Sulfonylurea responsive repressor L6-5F08
MGSRLDKSKVINSALELLNEVGIEGLTTRKLAQKLGVEQPTLYWHVKNKRALLDALAIEMMDRHATHYCPLEGESWQDFLRNNAKSMRCALLSHRDGAKVCLGTRWTEKHYETAENQLAFLCQQGFSLENALYAMSAVRVFTLGCVLFDQESQVAKEERETPTTASMPPLLRQVWELKDHQGAEPAFLFGLELIICGLEKQLKCESGS

SEQ ID NO: 165 - protein, 208 aa, Artificial Sequence
  Sulfonylurea responsive repressor L6-5F10
  misc_feature (110)..(110): Xaa can be any naturally occurring amino acid
MGSRLDKSKVINSALELLNEVGIEGLTTRKLAQKLGVEQPTLYWHVKNKRALLDALAIEMMDRHQTHYCPLEGESWQDFLRNNAKSMRCALLSHRDGAKVWLGTRWTEQXYEAAENMLAFLCQQGFSLENALYAVSAVGVFTLGCVLFDQELQVAKEERETPTTASMPPLARQVLELKDHQGAEPAFLFGLELIICGLEKQLKCESGS

SEQ ID NO: 166 - protein, 208 aa, Artificial Sequence
  Sulfonylurea responsive repressor L6-5F12
MGSRLDKSKVINSALELLNEVGIEGLTTRKLAQKLGVEQPTLYWHVKNKRALLDALAIEMMDRHATHYCPLEGESWQDFLRNNAKSMRCALLSHRDGAKVCLGTRWTEKLYEAAENMLAFLCQQGFSLENALYAVSAVRVFTLGCVLFDQESQVAKEERETPTTASMPPLLRQVWELKDHQGAEPAFLFGLELIICGLEKQLKCESGS

SEQ ID NO: 167 - protein, 208 aa, Artificial Sequence
  Sulfonylurea responsive repressor L6-5G03
MGSRLDKSKVINSALELLNEVGIEGLTTRKLAQKLGVEQPTLYWHVKNKRALLDALAIEMMDRHATHMCPLEGESWQDFLRNNAKSMRCALLSHRDGAKVWLGTRWTEQQYETAENMLAFLCQQGFSLENALYAVSAVRVFTLGCVLFDQELQVAKEERETPTTASMPPLLRQVWELKDHQGAEPAFLFGLELIICGLEKQLKCESGS

SEQ ID NO: 168 - protein, 208 aa, Artificial Sequence
  Sulfonylurea responsive repressor L6-5G05
MGSRLDKSKVINSALELLNEVGIEGLTTRKLAQKLGVEQPTLYWHVKNKRALLDALAIEMMDRHQTHYCPLEGESWQDFLRNNAKSMRCALLSHRDGAKVCLGTRWTEKQYETAENQLAFLCQQGFSLENALYAMSAVRNFTLGCVLFDQESQVAKEERETPTTASMPPLLRQAWELKDHQGAEPAFLFGLELIICGLEKQLKCESGS

SEQ ID NO: 169 - protein, 208 aa, Artificial Sequence
  Sulfonylurea responsive repressor L6-5G06
MGSRLDKSKVINSALELLNEVGIEGLTTRKLAQKLGVEQPTLYWHVKNKRALLDALAIEMMDRHQTHYCPLEGESWQDFLRNNAKSMRCALLSHRDGAKVCLGTRWTEQQYETAENQLAFLCQQGFSLENALYAVSAVRVFTLGCVLFDQELQVAKEERETPTTASMPPLLRQGWELKDHQGAEPAFLFGLELIICGLEKQLKCESGS

SEQ ID NO: 170 - protein, 208 aa, Artificial Sequence
  Sulfonylurea responsive repressor L6-5G08
MGSRLDKSKVINSALELLNEVGIEGLTTRKLAQKLGVEQPTLYWHVKNKRALLDALAIEMMDRHQTHICPLEGESWQDFLRNNAKSMRCALLSHRDGAKVCLGTRWTEKLYETAENQLAFLCQQGFSLENALYAMSAVRVFTLGCVLFDQELQVAKEERETPTTASMPPLVRQVWELKDHQGAEPAFLFGLELIICGLEKQLKCESGS

SEQ ID NO: 171 - protein, 208 aa, Artificial Sequence
  Sulfonylurea responsive repressor L6-5G11
MGSRLDKSKVINSALELLNEVGIEGLTTRKLAQKLGVEQPTLYWHVKNKRALLDALAIEMMDRHQTHICPLEGESWQDFLRNNAKSMRCALLSHRDGAKVCLGTRWTEKQYESAENMLAFLCQQGFSLENALYAVSAVRVFTLGCVLFDQELQVAKEERETPTTASMPPLVRQVWELKDHQGAEPAFLFGLELIICGLEKQLKCESGS

SEQ ID NO: 172 - protein, 208 aa, Artificial Sequence
  Sulfonylurea responsive repressor L6-5G12
MGSRLDKSKVINSALELLNEVGIEGLTTRKLAQKLGVEQPTLYWHVKNKRALLDALAIEMMDRHATHLCPLEGESWQDFLRNNAKSMRCALLSHRDGAKVCLGTRWTEKQYEAAENQLAFLCQQGFSLENALYAVSAVRVFTLGCVLFDQESQVAKEERETPTTASMPPLLRQVWELKDHQGAEPAFLFGLELIICGLEKQLKCESGS

SEQ ID NO: 173 - protein, 208 aa, Artificial Sequence
  Sulfonylurea responsive repressor L6-5H03
MGSRLDKSKVINSALELLNEVGIEGLTTRKLAQKLGVEQPTLYWHVKNKRALLDALAIEMMDRHATHLCPLEGESWQDFLRNNAKSMRCALLSHRDGAKVCLGTRWTEQLYETAENMLAFLCQQGFSLENALYAVSAVRNFTLGCVLFDQESQVAKEERETPTTASMPPLLRQVWELKDHQGSEPAFLFGLELIICGLEKQLKCESGS

SEQ ID NO: 174 - protein, 208 aa, Artificial Sequence
  Sulfonylurea responsive repressor L6-5H06
MGSRLDKSKVINSALELLNEVGIEGLTTRKLAQKLGVEQPTLYWHVKNKRALLDALAIEMMDRHQTHICPLEGESWQDFLRNNAKSMRCALLSHRDGAKVCLGTRWTEKQYETAENMLAFLCQQGFSLENALYAVSAVRVFTLGCVLFDQELQVAKEERETPTTASMPPLVRQAWELKDHQGAEPAFLFGLELIICGLEKQLKCESGS

SEQ ID NO: 175 - protein, 208 aa, Artificial Sequence
  Sulfonylurea responsive repressor L6-5H07
MGSRLDKSKVINSALELLNEVGIEGLTTRKLAQKLGVEQPTLYWHVKNKRALLDALAIEMMDRHQTHMCPLEGESWQDFLRNNAKSMRCALLSHRDGAKVCLGTRWTEQQYEAAENMLAFLCQQGFSLENALYAMSAVRNFTLGCVLFDQESQVAKEERETPTTASMPPLLRQAWELKDHQGAEPAFLFGLELIICGLEKQLKCESGS

SEQ ID NO: 176 - protein, 208 aa, Artificial Sequence
  Sulfonylurea responsive repressor L6-5H12
MGSRLDKSKVINSALELLNEVGIEGLTTRKLAQKLGVEQPTLYWHVKNKRALLDALAIEMMDRHATHYCPLEGESWQDFLRNNAKSMRCALLSHRDGAKVCLGTRWTEKQYETAENQLAFLCQQGFSLENALYAMSAVRVFTLGCVLFDQELQVAKEERETPTTASMPPLVRQAWELKDHQGAEPAFLFGLELIICGLEKQLKCESGS

SEQ ID NO: 177 - protein, 208 aa, Artificial Sequence
  Sulfonylurea responsive repressor L6-6A09
MGSRLDKSKVINSALELLNEVGIEGLTTRKLAQKLGVEQPTLYWHVKNKRALLDALAIEMMDRHQTHYCPLEGESWQDFLRNTAKSMRCALLSHRDGAKVCLGTRWTEKQYETAENMLAFLCQQGFSLENALYAVSAVRVFTLGCVLFDQESQVAKEERETPTTASMPPLLRQGLELKDHQGAEPAFLFGLELIICGLEKQLKCESGS

SEQ ID NO: 178 - protein, 208 aa, Artificial Sequence
  Sulfonylurea responsive repressor L6-6B01
  misc_feature (65)..(65): Xaa can be any naturally occurring amino acid
MGSRLDKSKVINSALELLNEVGIEGLTTRKLAQKLGVEQPTLYWHVKNKRALLDALAIEMMDRHXTHYCPLEGESWQDFLRNNAKSMRCALLSHRDGAKVCLGTRWTEKHYETAENMLAFLCQQGFSLENALYAMSAVRNFTLGGVLFDQESQVAKEERETPTTASMPPLARQVWELKDHQGAEPAFLFGLELIICGLEKQLKCESGS

SEQ ID NO: 179 - protein, 208 aa, Artificial Sequence
  Sulfonylurea responsive repressor L6-6B03
MGSRLDKSKVINSALELLNEVGIEGLTTRKLAQKLGVEQPTLYWHVKNKRALLDALAIEMMDRHQTHICPLEGESWQDFLRNNAKSMRCALLSHRDGAKVCLGTRWTEKMYETAENQLAFLCQQGFSLENALYAMSAVRVFTLGCVLFDQELQVAKEERETPTTASMPPLLRQAWELKDHQGAEPAFLFGLELIICGLEKQLKCESGS

SEQ ID NO: 180 - protein, 208 aa, Artificial Sequence
  Sulfonylurea responsive repressor L6-6B04
MGSRLDKSKVINSALELLNEVGIEGLTTRKLAQKLGVEQPTLYWHVKNKRALLDALAIEMMDRHQTHYCPLEGESWQDFLRNTAKSMRCALLSHRDGAKVCLGTRWTEQQYETAENMLAFLCQQGFSLENALYAVSAVRVFTLGCVLFDQESQVAKEERETPTTASMPPLLRQAWELKDHQGAEPAFLFGLELIICGLEKQLKCESGS

SEQ ID NO: 181 - protein, 208 aa, Artificial Sequence
  Sulfonylurea responsive repressor L6-6B05
MGSRLDKSKVINSALELLNEVGIEGLTTRKLAQKLGVEQPTLYWHVKNKRALLDALAIEMMDRHATHYCPLEGESWQDFLRNNAKSMRCALLSHRDGAKVCLGTRWTEQHYETAENQLAFLCQQGFSLENALYAVSAVRVFTLGCVLFDQESQVAKEERETPTTASMPPLLRQVWELKDHQGAEPAFLFGLELIICGLEKQLKCESGS

SEQ ID NO: 182 - protein, 208 aa, Artificial Sequence
  Sulfonylurea responsive repressor L6-6B10
MGSRLDKSKVINSALELLNEVGIEGLTTRKLAQKLGVEQPTLYWHVKNKRALLDALAIEMMDRHATHLCPLEGESWQDFLRNNAKSMRCALLSHRDGAKVCLGTRWTEKQYETAENQLAFLCQQGFSLENALYAVSAVRVFTLGCVLFDQESQVAKEERETPTTASMPPLLRQVWELKDHQGAEPAFLFGLELIICGLEKQLKCESGS

SEQ ID NO: 183 - protein, 208 aa, Artificial Sequence
  Sulfonylurea responsive repressor L6-6C01
MGSRLDKSKVINSALELLNEVGIEGLTTRKLAQKLGVEQPTLYWHVKNKRALLDALAIEMMDRHQTHYCPLEGESWQDFLRNNAKSMRCALLSHRDGAKVCLGTRWTEQQYETAENMLAFLCQQGFSLENALYAMSAVRVFTLGCVLFDQESQVAKEERETPTTASMPPLLRQALELKDHQGAEPAFLFGLELIICGLEKQLKCESGS

SEQ ID NO: 184 - protein, 208 aa, Artificial Sequence
  Sulfonylurea responsive repressor L6-6C02
MGSRLDKSKVINSALELLNEVGIEGLTTRKLAQKLGVEQPTLYWHVKNKRALLDALAIEMMDRHQTHFCPLEGESWQDFLRNTAKSMRCALLSHRDGAKVCLGTRWTEQLYEAAENMLAFLCQQGFSLENALYAVSAVRVFTLGCVLFDQESQVAKEERETPTTASMPPLLRQGWELKDHQGAEPAFLFGLELIICGLEKQLKCESGS

SEQ ID NO: 185 - protein, 208 aa, Artificial Sequence
  Sulfonylurea responsive repressor L6-6C04
MGSRLDKSKVINSALELLNEVGIEGLTTRKLAQKLGVEQPTLYWHVKNKRALLDALAIEMMDRHATHLCPLEGESWQDFLRNNAKSMRCALLSHRDGAKVCLGTRWTEQLYETAENQLAFLCQQGFSLENALYAVSAVRVFTLGCVLFDQESQVAKEERETPTTASMPPLLRQVWELKDHQGAEPAFLFGLELIICGLEKQLKCESGS

SEQ ID NO: 186 - protein, 208 aa, Artificial Sequence
  Sulfonylurea responsive repressor L6-6C05
MGSRLDKSKVINSALELLNEVGIEGLTTRKLAQKLGVEQPTLYWHVKNKRALLDALAIEMMDRHQTHYCPLEGESWQDFLRNNAKSMRCALLSHRDGAKVCLGTRWTEQMYEGAENMLAFLCQQGFSLENALYAVSAVRNFTLGCVLFDQESQVAKEERETPTTASMPPLLRQAWELKDHQGAEPAFLFGLELIICGLEKQLKCESGS

SEQ ID NO: 187 - protein, 208 aa, Artificial Sequence
  Sulfonylurea responsive repressor L6-6C06
MGSRLDKSKVINSALELLNEVGIEGLTTRKLAQKLGVEQPTLYWHVKNKRALLDALAIEMMDRHATHYCPLEGESWQDFLRNNAKSMRCALLSHRDGAKVCLGTRWTEQQYETAENQLAFLCQQGFSLENALYAMSAVRVFTLGCVLFDQESQVAKEERETPTSASMPPLVRQVWELKDHQGAEPAFLFGLELIICGLEKQLKCESGS

SEQ ID NO: 188 - protein, 208 aa, Artificial Sequence
  Sulfonylurea responsive repressor L6-6C07
MGSRLDKSKVINSALELLNEVGIEGLTTRKLAQKLGVEQPTLYWHVKNKRALLDALAIEMMDRHQTHYCPLEGESWQDFLRNTAKSMRCALLSHRDGAKVCLGTRWTEKQYEAAENMLAFLCQQGFSLENALYAMSAVRVFTLGCVLFDQESQVAKEERETPTTASMPPLLRQAWELKDHQGAEPAFLFGLELIICGLEKQLKCESGS

SEQ ID NO: 189 - protein, 208 aa, Artificial Sequence
  Sulfonylurea responsive repressor L6-6C10
MGSRLDKSKVINSALELLNEVGIEGLTTRKLAQKLGVEQPTLYWHVKNKRALLDALAIEMMDRHQTHLCPLEGESWQDFLRNNAKSMRCALLSHRDGAKVCLGTRWTEQLYEAAENMLAFLCQQGFSLENALYAVSAVRVFTLGCVLFDQESQVAKEERETPTTASMPPLVRQGWELKDHQGAEPAFLFGLELIICGLEKQLKCESGS

SEQ ID NO: 190 - protein, 208 aa, Artificial Sequence
  Sulfonylurea responsive repressor L6-6C11
MGSRLDKSKVINSALELLNEVGIEGLTTRKLAQKLGVEQPTLYWHVKNKRALLDALAIEMMDRHQTHYCPLEGESWQDFLRNTAKSMRCALLSHRDGAKVCLGTRWTEQLYETAENQLAFLCQQGFSLENALYAMSAVRVFTLGCVLFDQESQVAKEERETPTTASMPPLLRQGWELKDHQGAEPAFLFGLELIICGLEKQLKCESGS

SEQ ID NO: 191 - protein, 208 aa, Artificial Sequence
  Sulfonylurea responsive repressor L6-6D02
MGSRLDKSKVINSALELLNEVGIEGLTTRKLAQKLGVEQPTLYWHVKNKRALLDALAIEMMDRHQTHYCPLEGESWQDFLRNTAKSMRCALLSHRDGAKVCLGTRWTEQHYEAAENMLAFLCQQGFSLENALYAMSAVRVFTLGCVLFDQESQVAKEERETPTTASMPPLLRQAWELKDHQGAEPAFLLGLELIICGLEKQLKCESGS

SEQ ID NO: 192 - protein, 208 aa, Artificial Sequence
  Sulfonylurea responsive repressor L6-6D06
MGSRLDKSKVINSALELLNEVGIEGLTTRKLAQKLGVEQPTLYWHVKNKRALLDALAIEMMDRHQTHMCPLEGESWQDFLRNNAKSMRCALLSHRDGAKVCLGTRWTEKQYEGAENQLAFLCQQGFSLENALYAVSAVRVFTLGCVLFDQESQVAKEERETPTTASMPPLVRQVWELKDHQGAEPAFLFGLELIICGLEKQLKCESGS

SEQ ID NO: 193 - protein, 208 aa, Artificial Sequence
  Sulfonylurea responsive repressor L6-6D07
MGSRLDKSKVINSALELLNEVGIEGLTTRKLAQKLGVEQPTLYWHVKNKRALLDALAIEMMDRHQTHICPLEGESWQDFLRNNAKSMRCALLSHRDGAKVCLGTRWTEQQYEGAENQLAFLCQQGFSLENALYAMSAVRVFTLGCVLFDQESQVAKEERETPTTASMPPLLRQGWELKDHQGAEPAFLFGLELIICGLEKQLKCESGS

SEQ ID NO: 194 - protein, 208 aa, Artificial Sequence
  Sulfonylurea responsive repressor L6-6D09
MGSRLDKSKVINSALELLNEVGIEGLTTRKLAQKLGVEQPTLYWHVKNKRALLDALAIEMMDRHATHMCPLEGESWQDFLRNNAKSMRCALLSHRDGAKVCLGTRWTEQHYETAENQLAFLCQQGFSLENALYAVSAVRVFTLGCVLFDQESQVAKEERETPTTASMPPLLRQGWELKDHQGAEPAFLFGLELIICGLEKQLKCESGS

SEQ ID NO: 195 - protein, 208 aa, Artificial Sequence
  Sulfonylurea responsive repressor L6-6D10
MGSRLDKSKVINSALELLNEVGIEGLTTRKLAQKLGVEQPTLYWHVKNKRALLDALAIEMMDRHATHICPLEGESWQDFLRNNAKSMRCALLSHRDGAKVCLGTRWTEQQYETAENMLAFLCQQGFSLENALYAVSAVRVFTLGCVLFDQESQVAKEERETPTTASMPPLVRQALELKDHQGAEPAFLFGLELIICGLEKQLKCESGS

SEQ ID NO: 196 - protein, 208 aa, Artificial Sequence
  Sulfonylurea responsive repressor L6-6D12
MGSRLDKSKVINSALELLNEVGIEGLTTRKLAQKLGVEQPTLYWHVKNKRALLDALAIEMMDRHATHFCPLEGESWQDFLRNNAKSMRCALLSHRDGAKVWLGTRWTEQQYETAENMLAFLCQQGFSLENALYAVSAVRVFTLGCVLFDQERQVAKEERETPTTASMPPLLRQVWELKDHQGAEPAFLFGLELIICGLEKQLKCESGS

SEQ ID NO: 197 - protein, 208 aa, Artificial Sequence
  Sulfonylurea responsive repressor L6-6E01
MGSRLDKSKVINSALELLNEVGIEGLTTRKLAQKLGVEQPTLYWHVKNKRALLDALAIEMMDRHQTHFCPLEGESWQDFLRNNAKSMRCALLSHRDGAKVCLGTRWTEQQYEAAENQLAFLCQQGFSLENALYAMSAVRNFTLGCVLFDQELQVAKEERETPTTASMPPLLRQVWELKDHQGAEPAFLFGLELIICGLEKQLKCESGS

SEQ ID NO: 198 - protein, 208 aa, Artificial Sequence
  Sulfonylurea responsive repressor L6-6E02
MGSRLDKSKVINSALELLNEVGIEGLTTRKLAQKLGVEQPTLYWHVKNKRALLDALAIEMMDRHQTHVCPLEGESWQDFLRNNAKSMRCALLSHRDGAKVCLGTRWTEQMYETAENMLAFLCQQGFSLENALYAMSAVRVFTLGCVLFDQELQVAKEERETPTTASMPPLLRQAWELKDHQGAEPAFLFGLELIICGLEKQLKCESGS

SEQ ID NO: 199 - protein, 208 aa, Artificial Sequence
  Sulfonylurea responsive repressor L6-6E03
  misc_feature (146)..(146): Xaa can be any naturally occurring amino acid
  misc_feature (201)..(201): Xaa can be any naturally occurring amino acid
MGSRLDKSKVINSALELLNEVGIEGLTTRKLAQKLGVEQPTLYWHVKNKRALLDALAIEMMDRHQTHYCPLEGESWQDFLRNNAKSMRCALLSHRDGAKVCLGTRWTEQHYETAENQLAFLCQQGFSLENALYAMSAVRVFTLGCXLFDQESQVAKEERETPTTASMPPLVRQVWELKDHQGAEPAFLFGLELIICGLEKXLKCESGS

SEQ ID NO: 200 - protein, 208 aa, Artificial Sequence
  Sulfonylurea responsive repressor L6-6E11
MGSRLDKSKVINSALELLNEVGIEGLTTRKLAQKLGVEQPTLYWHVKNKRALLDALAIEMMDRHQTHYCPLEGESWQDFLRNTAKSMRCALLSHRDGAKVCLGTRWTEQHYEGAENMLAFLCQQGFSLENALYAVSAVRVFTLGCVLFDQELQVAKEERETPTTASMPPLVRQGWELKDHQGAEPAFLFGLELIICGLEKQLKCESGS

SEQ ID NO: 201 - protein, 208 aa, Artificial Sequence
  Sulfonylurea responsive repressor L6-6F03
MGSRLDKSKVINSALELLNEVGIEGLTTRKLAQKLGVEQPTLYWHVKNKRALLDALAIEMMDRHQTHVCPLEGESWQDFLRNNAKSMRCALLSHRDGAKVCLGTRWTEQQYEAAENQLAFLCQQGFSLENALYAMSAVRVFTLGCVLFDQELQVAKEERETPTTASMPPLLRQVWELKDHQGAEPAFLFGLELIICGLEKQLKCESGS

SEQ ID NO: 202 - protein, 208 aa, Artificial Sequence
  Sulfonylurea responsive repressor L6-6F07
MGSRLDKSKVINSALELLNEVGIEGLTTRKLAQKLGVEQPTLYWHVKNKRALLDALAIEMMDRHATHLCPLEGESWQDFLRNTAKSMRCALLSHRDGAKVCLGTRWTEQQYESAENMLAFLCQQGFSLENALYAMSAVRVFTLGCVLFDQESQVAKEERETPTTASMPPLLRQAWELKDHQGAEPAFLFGLELIICGLEKQLKCESGS

SEQ ID NO: 203 - protein, 208 aa, Artificial Sequence
  Sulfonylurea responsive repressor L6-6F08
MGSRLDKSKVINSALELLNEVGIEGLTTRKLAQKLGVEQPTLYWHVKNKRALLDALAIEMMDRHQTHYCPLEGESWQDFLRNTAKSMRCALLSHRDGAKVCLGTRWTEQQYESAENQLAFLCQQGFSLENALYAVSAVRVFTLGCVLFDQELQVAKEERETPTTASMPPLLRQVWELKDHQGAEPAFLFGLELIICGLEKQLKCESGS

SEQ ID NO: 204 - protein, 208 aa, Artificial Sequence
  Sulfonylurea responsive repressor L6-6G01
MGSRLDKSKVINSALELLNEVGIEGLTTRKLAQKLGVEQPTLYWHVKNKRALLDALAIEMMDRHATHVCPLEGESWQDFLRNTAKSMRCALLSHRDGAKVCLGTRWTEQQYETAENMLAFLCQQGFSLENALYAMSAVRVFTLGCVLFDQESQVAKEERETPTTASMPPLLRQVWELKDHQGAEPAFLFGLELIICGLEKQLKCESGS

SEQ ID NO: 205 - protein, 208 aa, Artificial Sequence
  Sulfonylurea responsive repressor L7-1A01
MGSRLDKSKVINSALELLNEVGIEGLTTRKLAQKLGVEQPTLYWHVKNKRALLDALAIEMLDRHATHYCPLEGESWQDFLRNNAKSMRCALLSHRDGAKVCLGTGFTEKQYETAENSLAFLCQQGFSLEHAMYAMQAAGIYTLGCVLLDQELQVAKEERETPTTDSMPPLVRQVLELKDHQGAEPAFLFGLELIICGLEKQLKCESGS

SEQ ID NO: 206 - protein, 208 aa, Artificial Sequence
  Sulfonylurea responsive repressor L7-1B01
MGSRLDKSKAINSALELLNEVGIEGLTTRKLAQKLGVEQPTLYWHVKNKRALLDAMAIEMLDRHATHYCPLEGESWQDFLRNNAKSMRCALLSHRDGAKVCLGTGFTEQQYEAAENSMAFLCQQGFSLEHALYAMQAAGIFTLGCVLLDQELQVAKEERETPTTDSMPPLVRQVLELKDHQGAEPAFLFGLELIICGLEKQLKCESGS

SEQ ID NO: 207 - protein, 208 aa, Artificial Sequence
  Sulfonylurea responsive repressor L7-1C01
MGSRLDKSKVINSALELLNEVGIEGLTTRKLAQKLGVEQPTLYWHVKNKRALLDALAIEMLDRHATHYCPLEGESWQDFLRNNAKSMRCALLSHRDGAKVCLGTGFTEQMYEAAENSMAFLCQQGFSLEHAMYAMQAVGIYTLGCVLLDQELQVAKEERETPTTDSMPPLVRQVLELKDHQGAEPAFLFGLELIICGLEIQLKCESGS

SEQ ID NO: 208 - protein, 208 aa, Artificial Sequence
  Sulfonylurea responsive repressor L7-1D01
  misc_feature (10)..(10): Xaa can be any naturally occurring amino acid
MGSRLDKSKXINSALELLNEVGIEGLTTRKLAQKLGVEQPTLYWHVKNKRALLDAMAIEMLDRHATHYCPLEGESWQDFLRNNAKSMRCALLSHRDGAKVCLGTGFTEQQYETAENSLAFLCQQGFSLENALYAMQAVGIYTLGCVLLDQELQVAKEERETPTTDSMPPLVRQVLELKDHQGAEPAFLFGLELIICGLEKQLKCESGS

SEQ ID NO: 209 - protein, 208 aa, Artificial Sequence
  Sulfonylurea responsive repressor L7-1E01
  misc_feature (9)..(9): Xaa can be any naturally occurring amino acid
MGSRLDKSXPINSALELLNEVGIEGLTTRKLAQKLGVEQPTLYWHVKNKRALLDALAIEMLDRHATHYCPLEGESWQDFLRNNAKSMRCALLSHRDGAKVCLGTGFTEQQYESAENSMAFLCQQGFSLEHALYAMQAVGIFTLGCVLLDQELQVAKEERETPTTDSMPPLLRQALELKDHQGAEPAFLFGLELIICGLEKQLKCESGS

SEQ ID NO: 210 - protein, 208 aa, Artificial Sequence
  Sulfonylurea responsive repressor L7-1F01
MGSRLDKSKVINSALELLNEVGIEGLTTRKLAQKLGVEQPTLYWHVKNKRALLDAMAIEMLDRHATHICPLEGESWQDFLRNNAKSMRCALLSHRDGAKVCLGTGFTEQQYESAENSMAFLCQQGFSLENAMYAMQAVGIFTLGCVLLDQELQVAKEERETPTTDSMPPLVRQVLELKDHQGAEPAFLFGLELIICGLEKQLKCESGS

SEQ ID NO: 211 - protein, 208 aa, Artificial Sequence
  Sulfonylurea responsive repressor L7-1G01
MGSRLDKSKVINSALELLNEVGIEGLTTRKLAQKLGVEQPTLYWHVKNKRALLDAMAIEMLDRHATHVCPLEGESWQDFLRNNAKSMRCALLSHRDGAKVCLGTGFTEQQYETAENSMAFLCQQGFSLENAMYAMQAVGIFTLGCVLLDQELQVAKEERETPTTDSMPPLVRQALELKDHQGAEPAFLFGLELIICGLEKQLKCESGS

SEQ ID NO: 212 - protein, 208 aa, Artificial Sequence
  Sulfonylurea responsive repressor L7-1C02
MGSRLDKSKVINSALELLNEVGIEGLTTRKLAQKLGVEQPTLYWHVKNKRALLDAMAIEMLDRHATHYCPLEGESWQDFLRNNAKSMRCALLSHRDGAKVCLGTGFTEQMYETAENSMAFLCQQGFSLEHALYAMQAVGIYTVGCVLLDQELQVAKEERETPTTDSMPPLVRQGLELKDHQGAEPAFLFGLELIICGLEKQLKCESGS

SEQ ID NO: 213 - protein, 208 aa, Artificial Sequence
  Sulfonylurea responsive repressor L7-1D02
  misc_feature (110)..(110): Xaa can be any naturally occurring amino acid
MGSRLDKSKAINSALELLNEVGIEGLTTRKLAQKLGVEQPTLYWHVKNKRALLDAMAIEMLDRHATHYCPLEGESWQDFLRNNAKSMRCALLSHRDGAKVCLGTGFTEQXYEAAENSMAFLCQQGFSLENAMYAMQAVGIYTLGCVLLDQELQVAKEERETPTTDSMPPLVRQVLELKDHQGAEPAFLFGLELIICGLEKQLKCESGS

SEQ ID NO: 214 - protein, 208 aa, Artificial Sequence
  Sulfonylurea responsive repressor L7-1E02
  misc_feature (56)..(56): Xaa can be any naturally occurring amino acid
  misc_feature (110)..(110): Xaa can be any naturally occurring amino acid
  misc_feature (138)..(139): Xaa can be any naturally occurring amino acid
MGSRLDKSKVINSALELLNEVGIEGLTTRKLAQKLGVEQPTLYWHVKNKRALLDAXAIEMLDRHATHYCPLEGESWQDFLRNNAKSMRCALLSHRDGAKVCLGTGFTEQXYETAENSLAFLCQQGFSLENAMYAMQAXXIYTLGCVLLDQELQVAKEERETPTTDSMPPLVRQALELKDHQGAEPAFLFGLELIICGLEKQLKCESGS

SEQ ID NO: 215 - protein, 208 aa, Artificial Sequence
  Sulfonylurea responsive repressor L7-1F02
MGSRLDKSKVINSALELLNEVGIEGLTTRKLAQKLGVEQPTLYWHVKNKRALLDAMAIEMLDRHATHYGPLEGESWQDFLRNNAKSMRCALLSHRDGAKVCLGTGFTEQQYETAENSMAFLCQQGFSLENAMYAMQAVCIYTLGCVLLDQELQVAKEERETPTTDSMPPLVRQVLELKDHQGAEPAFLFGLELIICGLEKQLKCESGS

SEQ ID NO: 216 - protein, 208 aa, Artificial Sequence
  Sulfonylurea responsive repressor L7-1G02
  misc_feature (10)..(10): Xaa can be any naturally occurring amino acid
MGSRLDKSKXINSALELLNEVGIEGLTTRKLAQKLGVEQPTLYWHVKNKRALLDAMAIEMLDRHATHYCPLEGESWQDFLRNNAKSMRCALLSHRDGAKVCLGTGFTEKMYEGAENSMAFLCQQGFSLEHAMYAMQAAGIFTLGCVLLDQELQVAKEERETPTTDSMPPLVRQALELKDHQGAEPAFLFGLELIICGLEKQLKCESGS

SEQ ID NO: 217 - protein, 208 aa, Artificial Sequence
  Sulfonylurea responsive repressor L7-1H02
MGSRLDKSKVINSALELLNEVGIEGLTTRKLAQKLGVEQPTLYWHVKNKRALLDAMAIEMLDRHATHYCPLEGESWQDFLRNNAKSMRCALLSHRDGAKVCLGTGFTEQQYETAENSLAFLCQQGFSLEHAMYAMQAVGIFTLGCVLLDQELQVAKEERETPTTDSMPPLVRQALELKDHQGAEPAFLFGLELIICGLEKQLKCESGS

SEQ ID NO: 218 - protein, 208 aa, Artificial Sequence
  Sulfonylurea responsive repressor L7-1C03
MGSRLDKSKAINSALELLNEVGIEGLTTRKLAQKLGVEQPTLYWHVKNKRALLDAMAIEMLDRHATHVCPLEGESWQDFLRNNAKIMRCALLSHRDGAKVCLGTGFTEQQYETAENSLAFLCQQGFSLEHALYAMQAAGIFTLGCVLLDQELQVAKEERETPTTDSMPPLVRQALELNDHQGAEPAFLFGLELIICGLEKQLKCESGS

SEQ ID NO: 219 - protein, 208 aa, Artificial Sequence
  Sulfonylurea responsive repressor L7-1E03
MGSRLDKSKAINSALELLNEVGIEGLTTRKLAQKLGVEQPTLYWHVKNKRALLDALAIEMLDRHATHYCPLEGESWQDFLRNNAKSMRCALLSHRDGAKVCLGTGFTEQMYETAENSMAFLCQQGFSLENAMYAMQAAGIYTLGCVLLDQELQVAKEERETPTTDSMPPLVRQVLELKDHQGAEPAFLFGLELIICGLEKQLKCESGS

SEQ ID NO: 220 - protein, 208 aa, Artificial Sequence
  Sulfonylurea responsive repressor L7-1A04
MGSRLDKSKVINSALELLNEVGIEGLTTRKLAQKLGVEQPTLYWHVKNKRALLDAMAIEMLDRHATHYCPLEGKSWQDFLRNNAKSMRCALLSHRDGAKVCLGTGFTEQQYESAENSMAFLCQQGFSLEHAMYAMQAAGIFTLGCVLLDQELQVAKEERETPTTDSMPPLLRQALELKDHQGAEPAFLFGLELIICGLEKQLKCESGS

SEQ ID NO: 221 - protein, 208 aa, Artificial Sequence
  Sulfonylurea responsive repressor L7-1C04
  misc_feature (10)..(10): Xaa can be any naturally occurring amino acid
MGSRLDKSKXINSALELLNEVGIEGLTTRKLAQKLGVEQPTLYWHVKNKRALLDALAIEMLDRHATHYCPLEGESWQDFLRNNAKSMRCALLSHRDGAKVCLGTGFTEQMYESAENSLAFLCQQGFSLEHAMYAMQAAGIYTLGCVLLDQELQVAKEERETPTTDSMPPLVRQGLELKDHQGAEPAFLFGLELIICGLEKQLKCESGS

SEQ ID NO: 222 - protein, 208 aa, Artificial Sequence
  Sulfonylurea responsive repressor L7-1D04
MGSRLDKSKAINSALELLNEVGIEGLTTRKLAQKLGVEQPTLYWHVKNKRALLDAMAIEMLDRHATHYCPLEGESWQDFLRNNAKSMRCALLSHRDGAKVCLGTGFTEQQYEGAENSMAFLCQQGFSLENAMYAMQAVGIFTLGCVLLDQELQVAKEERETPTTDSMPPLVRQGLELKDHQGAEPAFLFGLELIICGLEKQLKCESGS

SEQ ID NO: 223 - protein, 208 aa, Artificial Sequence
  Sulfonylurea responsive repressor L7-1E04
  misc_feature (10)..(10): Xaa can be any naturally occurring amino acid
MGSRLDKSKXINSALELLNEVGIEGLTTRKLAQKLGVEQPTLYWHVKNKRALLDAMAIEMLDRHATHYCPLEGESWQDFLRNNAKSMRCALLSHRDGAKVCLGTGFTEQQYETAENSLAFLCQQGFSLEHALYAMQAVGIYTLGCVLLDQELQVAKEERETPTTDSMPPLARQALELKDHQGAEPAFLFGLELIICGLEKQLKCESGS

SEQ ID NO: 224 - protein, 208 aa, Artificial Sequence
  Sulfonylurea responsive repressor L7-1F04
  misc_feature (10)..(10): Xaa can be any naturally occurring amino acid
MGSRLDKSKXINSALELLNEVGIEGLTTRKLAQKLGVEQPTLYWHVKNKRALLDALAIEMLDRHATHYCPLEGESWQDFLRNNAKSMRCALLSHRDGAKVCLGTGFTEQHYETAENSMAFLCQQGFSLENALYAMQAVGIFTLGCVLLDQELQVAKEERETPTTDSMPPLVRQALELKDHQGAEPAFLFGLELIICGLEKQLKCESGS

SEQ ID NO: 225 - protein, 208 aa, Artificial Sequence
  Sulfonylurea responsive repressor L7-1G04
  misc_feature (10)..(10): Xaa can be any naturally occurring amino acid
MGSRLDKSKXINSALELLNEVGIEGLTTRKLAQKLGVEQPTLYWHVKNKRALLDAMAIEMLDRHATHYCPLEGESWQDFLRNNAKSMRCALLSHRDGAKVCLGTGFTEQQYESAENSMAFLCQQGFSLENAMYAMQAVGIYTLGCVLLDQELQVAKEERETPTTDSMPPLLRQVLELKDHQGAEPAFLFGLELIICGLEKQLKCESGS

SEQ ID NO: 226 - protein, 208 aa, Artificial Sequence
  Sulfonylurea responsive repressor L7-1H04
  misc_feature (10)..(10): Xaa can be any naturally occurring amino acid
MGSRLDKSKXINSALELLNEVGIEGLTTRKLAQKLGVEQPTLYWHVKNKRALLDALAIEMLDRHATHYCPLEGESWQDFLRNNAKSMRCALLSHRDGAKVCLGTGFTEKQYEAAENSLAFLCQQGFSLEHALYAMQAAGIYTLGCVLLDQELQVAKEERETPTTDSMPPLVRQALELKDHQGAEPAFLFGLELIICGLEKQLKCESGS

SEQ ID NO: 227 - protein, 208 aa, Artificial Sequence
  Sulfonylurea responsive repressor L7-1A05
MGSRLDKSKVINSALELLNEVGIEGLTTRKLAQKLGVEQPTLYWHVKNKRALLDAMAIEMLDRHATHYCPLEGESWQDFLRNNAKSMRCALLSHRDGAKVCLGTGFTEQHYETAENSMAFLCQQGFSLEHALYAMQAAGIYTLGCVLLDQELQVAKEERETPTTDSMPPLVRQALELKDHQGAEPAFLFGLELIICGLEKQLKCESGS

SEQ ID NO: 228 - protein, 208 aa, Artificial Sequence
  Sulfonylurea responsive repressor L7-1C05
  misc_feature (10)..(10): Xaa can be any naturally occurring amino acid
MGSRLDKSKXINSALELLNEVGIEGLTTRKLAQKLGVEQPTLYWHVKNKRALLDAMAIEMLDRHATHYCPLEGESWQDFLRNNAKSMRCALLSHRDGAKVCLGTGFTEQHYETAENSMAFLCQQGFSLENAMYAMQAVGIYTLGCVLLDQELQVAKEERETPTTDSMPPLVRQALELKDHQGAEPAFLFGLELIICGLEKQLKCESGS

SEQ ID NO: 229 - protein, 208 aa, Artificial Sequence
  Sulfonylurea responsive repressor L7-1E05
MGSRLDKSKVINSALELLNEVGIEGLTTRKLAQKLGVEQPTLYWHVKNKRALLDAMAIEMLDRHATHYCPLEGESWQDFLRNNAKSMRCALLSHRDGAKVCLGTGFTEQQYETAENSMAFLCKQGFSLENAMYAMQAVGIYTLGCVLLDQELQVAKEERETPTTDSMPPLVRQVLELKDHQGAEPAFLFGLELIICGLEKQLKCESGS

SEQ ID NO: 230 - protein, 208 aa, Artificial Sequence
  Sulfonylurea responsive repressor L7-1F05
  misc_feature (56)..(56): Xaa can be any naturally occurring amino acid
  misc_feature (113)..(113): Xaa can be any naturally occurring amino acid
  misc_feature (118)..(118): Xaa can be any naturally occurring amino acid
  misc_feature (174)..(174): Xaa can be any naturally occurring amino acid
MGSRLDKSKVINSALELLNEVGIEGLTTRKLAQKLGVEQPTLYWHVKNKRALLDAXAIEMLDRHATHYCPLEGESWQDFLRNNAKSMRCALLSHRDGAKVCLGTGFTEQHYEXAENSXAFLCQQGFSLEHALYAMQAVGIYTLGCVLLDQELQVAKEERETPTTDSMPPLVRQXLELKDHQGAEPAFLFGLELIICGLEKQLKCESGS

SEQ ID NO: 231 - protein, 208 aa, Artificial Sequence
  Sulfonylurea responsive repressor L7-1A06
MGSRLDKSKVINSALELLNEVGIEGLTTRKLAQKLGVEQPTLYWHVKNKRALLDALAIEMLDRHATHYCPLEGESWQDFLRNNAKSMRCALLSHRDGAKVCLGTGFTEQHYESAENSLAFLCQQGFSLENAMYAMQAVGIFTLGCVLLDQELQVAKEERETPTTDSMPPLVRQVLELKDHQGAEPAFLFGLELIICGLEKQLKCESGS

SEQ ID NO: 232 - protein, 208 aa, Artificial Sequence
  Sulfonylurea responsive repressor L7-1B06
MGSRLDKSKAINSALELLNEVGIEGLTTRKLAQKLGVEQPTLYWHVKNKRALLDAMAIEMLDRHATHYCPLEGESWQDFLRNNAKSMRCALLSHRDGAKVCLGTGFTEQQYETAENSLAFLCQQGFSLENALYAMQAVGIYTLGCVLLDQELQVAKEERETPTTDSMPPLVRQVLELKDHQGAEPAFLFGLELIICGLEKQLKCESGS

SEQ ID NO: 233 - protein, 208 aa, Artificial Sequence
  Sulfonylurea responsive repressor L7-1D06
MGSRLDKSKVINSALELLNEVGIEGLTTRKLAQKLGVEQPTLYWHVKNKRALLDAMAIEMLDRHATHYCPLEGESWQDFLRNNAKSMRCALLSHRDGAKVCLGTGFTEQQYEAAENSMAFLCQQDFSLEHAMYAMQAVGIYTLGCVLLDQELQVAKEERETPTTDSMPPLVRQGLELKDHQGAEPAFLFGLELIICGLEKQLKCESGS

SEQ ID NO: 234 - protein, 208 aa, Artificial Sequence
  Sulfonylurea responsive repressor L7-1E06
  misc_feature (113)..(113): Xaa can be any naturally occurring amino acid
MGSRLDKSKVINSALELLNEVGIEGLTTRKLAQKLGVEQPTLYWHVKNKRALLDAMAIEMLDRHATHYCPLEGKSWQDFLRNNAKSMRCALLSHRDGAKVCLGTGFTEQHYEXAENSMAFLCQQGFSLEHAMYAMQAAGIFTLGCVLLDQELQVAKEERETPTTDSMPPLLRQALELKDHQGAEPAFLFGLELIICGLEKQLKCESGS

SEQ ID NO: 235 - protein, 208 aa, Artificial Sequence
  Sulfonylurea responsive repressor L7-1F06
MGSRLDKSKVINSALELLNEVGIEGLTTRKLAQKLGVEQPTLYWHVKNKRALLDAMAIEMLDRHATHYCPLEGESWQDFLRNNAKSMRCALLSHRDGAKVCLGTGFTEQQYETAENSLAFLCQQGFSLEHAMYAMQAAGIYTLGCVLLDQELQVAKEERETPTTDSMPPLVRQALELKDHQGAEPAFLFGLELIICGLEKQLKCESGS

SEQ ID NO: 236 - protein, 208 aa, Artificial Sequence
  Sulfonylurea responsive repressor L7-1G06
  misc_feature (10)..(10): Xaa can be any naturally occurring amino acid
MGSRLDKSKXINSALELLNEVGIEGLTTRKLAQKLGVEQPTLYWHVKNKRALLDAMAIEMLDRHATHYCPLEGESWQDFLRNNAKSMRCALLSHRDGAKVCLGTGFTEQQYETAENSMAFLCQQGFSLENALYAMQAVGIYTLGCVLLDQELQVAKEERETPTTDSMPPLVRQALELKDHQGAEPAFLFGLELIICGLEKQLKCESGS

SEQ ID NO: 237 - protein, 208 aa, Artificial Sequence
  Sulfonylurea responsive repressor L7-1H06
MGSRLDKSKAINSALELLNEVGIEGLTTRKLAQKLGVEQPTLYWHVKNKRALLDALAIEMLDRHATHYCPLEGESWQDFLRNNAKSMRCALLSHRDGAKVCLGTGFTEKHYETAENSMAFLCQQGFSLEHAMYAMQAVGIYTLGCVLLDQELQVAKEERETPTTDSMPPLVRQVLELKDHQGAEPAFLFGLELIICGLEKQLKCESGS

SEQ ID NO: 238 - protein, 208 aa, Artificial Sequence
  Sulfonylurea responsive repressor L7-1A07
  misc_feature (10)..(10): Xaa can be any naturally occurring amino acid
MGSRLDKSKXINSALELLNEVGIEGLTTRKLAQKLGVEQPTLYWHVKNKRALLDALAIEMLDRHATHYCPLEGESWQDFLRNNAKSMRCALLSHRDGAKVCLGTGFTEKQYEAAENSMAFLCQQGFSLEHAMYAMQAAGIYTLGCVLLDQELQVAKEERETPTTDSMPPLVRQVLELKDHQGAEPAFLFGLELIICGLEKQLKCESGS

SEQ ID NO: 239 - protein, 208 aa, Artificial Sequence
  Sulfonylurea responsive repressor L7-1B07
  misc_feature (10)..(10): Xaa can be any naturally occurring amino acid
MGSRLDKSKXINSALELLNEVGIEGLTTRKLAQKLGVEQPTLYWHVKNKRALLDAMAIEMLDRHATHYCPLEGESWQDFLRNNAKSMRCALLSHRDGAKVCLGTGFTEQQYETAENSMAFLCQQGFSLENAMYAMQAACIYTLGCVLLDQELQVAKEERETPTTDSMPPLVRQVLELKDHQGAEPAFLFGLELIICGLEKQLKCESGS

SEQ ID NO: 240 - protein, 208 aa, Artificial Sequence
  Sulfonylurea responsive repressor L7-1C07
  misc_feature (10)..(10): Xaa can be any naturally occurring amino acid
MGSRLDKSKXINSALELLNEVGIEGLTTRKLAQKLGVEQPTLYWHVKNKRALLDAMAIEMLDRHATHYCPLEGESWQDFLRNNAKSMRCALLSHRDGAKVCLGTGFTEQQYETAENSLAFLCQQGFSLEHALYAMQAAGIFTLGCVLLDQELQVAKEERETPTTDSMPPLVRQALELKDHQGAEPAFLFGLELIICGLEKQLKCESGS

SEQ ID NO: 241 - protein, 208 aa, Artificial Sequence
  Sulfonylurea responsive repressor L7-1D07
  misc_feature (10)..(10): Xaa can be any naturally occurring amino acid
MGSRLDKSKXINSALELLNEVGIEGLTTRKLAQKLGVEQPTLYWHVKNKRALLDAMAIEMLDRHATHVCPLEGESWQDFLRNNAKSMRCALLSHRDGAKVCLGTGFTEQQYEGAENSMAFLCQQGFSLEHAMYAMQAVGIYTLGCVLLDQELQVAKEERETPTTDSMPPLVRQALELKDHQGAEPAFLFGLELIICGLEKQLKCGSGS

SEQ ID NO: 242 - protein, 208 aa, Artificial Sequence
  Sulfonylurea responsive repressor L7-1E07
MGSRLDKSKVINSALELLNEVGIEGLTTRKLAQKLGVEQPTLYWHVKNKRALLDALAIEMLDRHATHICPLEGESWQDFLRNNAKSMRCALLSHRDGAKVCLGTGFTEQMYETAENSMAFLCQQGFSLENAMYAMQAAGIFTLGCVLLDQELQVAKEERETPTTDSMPPLVRQVLELKDHQGAEPAFLFGLELIICGLEKQLKCESGS

SEQ ID NO: 243 - protein, 208 aa, Artificial Sequence
  Sulfonylurea responsive repressor L7-1F07
  misc_feature (10)..(10): Xaa can be any naturally occurring amino acid
MGSRLDKSKXINSALELLNEVGIEGLTTRKLAQKLGVEQPTLYWHVKNKRALLDALAIEMLDRHATHYCPLEGESWQDFLRNNAKSMRCALLSHRDGAKVCLGTGFTEQMYESAENSLAFLCQQGFSLEHAMYAMQAAGIFTLGCVLLDQELQVAKEERETPTTDSMPPLVRQVLELKDHQGAEPAFLFGLELIICGLEKQLKCESGS

SEQ ID NO: 244 - protein, 208 aa, Artificial Sequence
  Sulfonylurea responsive repressor L7-1G07
  misc_feature (199)..(199): Xaa can be any naturally occurring amino acid
MGSRLDKSKVINSALELLNEVGIEGLTTRKLAQKLGVEQPTLYWHVKNKRALLDAMAIEMLDRHATHYCPLEGESWQDFLRNNAKSMRCALLSHRDGAKVCLGTGFTEQHYESAENSMAFLCQQGFSLEHAMYAMQAAGIYTLGCVLLDQELQVAKEERQTPTTDSMPPLVRQALELKDHQGAEPAFLFGLELIICGLXKQLKCESGS

SEQ ID NO: 245 - protein, 208 aa, Artificial Sequence
  Sulfonylurea responsive repressor L7-1A08
  misc_feature (10)..(10): Xaa can be any naturally occurring amino acid
MGSRLDKSKXINSALELLNEVGIEGLTTRKLAQKLGVEQPTLYWHVKNKRALLDAMAIEMLDRHATHLCPLEGESWQDFLRNNAKSMRCALLSHRDGAKVCLGTGFTEQQYETAENSMAFLCQQGFSLEHAMYAMQAVGIYTLGCVLLDQELQVAKEERETPTTDSMPPLLRQALELKDHQGAEPAFLFGLELIICGLEKQLKCESGS

SEQ ID NO: 246 - protein, 208 aa, Artificial Sequence
  Sulfonylurea responsive repressor L7-1C08
  misc_feature (56)..(56): Xaa can be any naturally occurring amino acid
  misc_feature (110)..(110): Xaa can be any naturally occurring amino acid
MGSRLDKSKVINSALELLNEVGIEGLTTRKLAQKLGVEQPTLYWHVKNKRALLDAXAIEMLDRHATHYCPLEGESWQDFLRNNAKSMRCALLSHRDGAKVCLGTGFTEQXYEAAENSMAFLCQQGFSLEHAMYAMQAAGIYTLGCVLLDQELQVAKEERETPTTDSMPPLVRQVLELKDHQGAEPAFLFGLELIICGLEKQLKCESGS

SEQ ID NO: 247 - protein, 208 aa, Artificial Sequence
  Sulfonylurea responsive repressor L7-1D08
  misc_feature (171)..(171): Xaa can be any naturally occurring amino acid
MGSRLDKSKVINSALELLNEVGIEGLTTRKLAQKLGVEQPTLYWHVKNKRALLDAMAIEMLDRHATHYCPLEGESWQDFLRNNAKSMRCALLSHRDGAKVCLGTGFTEQQYETAENSMAFLCQQGFSLEHALYAMQAAGIYTLGCVLLDQELQVAKEERETPTTDSMPPLXRQVLELKDHQGAEPAFLFGLELIICGLEKQLKCESGS

SEQ ID NO: 248 - protein, 208 aa, Artificial Sequence
  Sulfonylurea responsive repressor L7-1E08
  misc_feature (10)..(10): Xaa can be any naturally occurring amino acid
MGSRLDKSKXINSALELLNEVGIEGLTTRKLAQKLGVEQPTLYWHVKNKRALLDAMAIEMLDRHATHYCPLEGESWQDFLRNNAKSMRCALLSHRDGAKVCLGTGFTEQQYETAENSLAFLCQQGFSLEHAMYAMQAVGIFTLGCVLLDQELQVAKEERETPTTDSMPPLVRQVLELKDHQGAEPAFLFGLELIICGLEKQLKCESGS

SEQ ID NO: 249 - protein, 208 aa, Artificial Sequence
  Sulfonylurea responsive repressor L7-1F08
MGSRLDKSKVINSALELLNEVGIEGLTTRKLAQKLGVEQPTLYWHVKNKRALLDAMAIEMLDRHATHYCPLEGESWQDFLRNNAKSMRCALLSHRDGAKVCLGTGFTEQQYETAENSLAFLCQQGFSLENALYAMQAVGIYTLGCVLLDQELQVAKEERETPTTDSMPPLVRQALELKDHQGAEPAFLFGLELIICGLEKQLKCESGS

SEQ ID NO: 250 - protein, 208 aa, Artificial Sequence
  Sulfonylurea responsive repressor L7-1G08
MGSRLDKSKVINSALELLNEVGIEGLTTRKLAQKLGVEQPTLYWHVKNKRALLDAMAIEMLDRHATHYCPLEGESWQDFLRNNAKSMRCALLSHRDGAKVCLGTGFTEQHYETAENSLAFLCQQGFSLEHAMYAMQAVGIYTLGCVLLDQELQVAKEERETPTTDSMPPLVRQALELKDHQGAEPAFLFGLELIICGLEKQLKCESGS

SEQ ID NO: 251 - protein, 208 aa, Artificial Sequence
  Sulfonylurea responsive repressor L7-1A09
  misc_feature (10)..(10): Xaa can be any naturally occurring amino acid
MGSRLDKSKXINSALELLNEVGIEGLTTRKLAQKLGVEQPTLYWHVKNKRALLDAMAIEMLDRHATHYCPLEEESWQDFLRNNAKSMRCALLSHRDGAKVCLGTGFTEQQYEAAENSMAFLCQQGFSLEHALYAMQAAGIYTLGCVLLDQELQVAKEERETPTTDSMPPLVRQALELKDHQGAEPAFLFGLELIICGLEKQLKCESGS

SEQ ID NO: 252 - protein, 208 aa, Artificial Sequence
  Sulfonylurea responsive repressor L7-1B09
MGSRLDKSKVINSALELLNEVGIEGLTTRKLAQKLGVEQPTLYWHVKNKRALLDAMAIEMLDRHATHYCPLEGESWQDFLRNNAKSMRCALLSHRDGAKVCLGTGFTEQQYETAENSLAFLCQQGFSLENAMYAMQAAGIYTLGCVLLDQELQVAKEERETPTTDSMPPLVRQGLELKDHQGAEPAFLFGLELIICGLEKQLKCESGS

SEQ ID NO: 253 - protein, 208 aa, Artificial Sequence
  Sulfonylurea responsive repressor L7-1C09
MGSRLDKSKAINSALELLNEVGIEGLTTRKLAQKLGVEQPTLYWHVKNKRALLDALAIEMLDRHATHYCPLEGESWQDFLRNNAKSMRCALLSHRDGAKVCLGTGFTEQHYETAENSLAFLCQQGFSLENAMYAMQAVGIFTLGCVLLDQELQVAKEERETPTTDSMPPLVRQVLELKDHQGAEPAFLFGLELIICGLEKQLKCESGS

SEQ ID NO: 254 - protein, 208 aa, Artificial Sequence
  Sulfonylurea responsive repressor L7-1D09
MGSRLDKSKVINSALELLNEVGIEGLTTRKLAQKLGVEQPTLYWHVKNKRALLDAMAIEMLDRHATHYCPLEGESWQDFLRNNAKSMRCALLSHRDGAKVCLGTGFTEQQYESAENSLAFLCQQGFSLENAMYAMQAAGIYTLGCVLLDQELQVAKEERETPTTDSMPPLLRQALELKDHQGAEPAFLFGLELIICGLEKQLKCESGS

SEQ ID NO: 255 - protein, 208 aa, Artificial Sequence
  Sulfonylurea responsive repressor L7-1E09
  misc_feature (10)..(10): Xaa can be any naturally occurring amino acid
MGSRLDKSKXINSALELLNEVGIEGLTTRKLAQKLGVEQPTLYWHVKNKRALLDAMAIEMLDRHATHYCPLEGESWQDFLRNNAKSMRCALLSQRDGAKVCLGTGFTEQQYEGAENSLAFLCQQGFSLEHALYAMQAAGIFTLGCVLLDQELQVAKEERETPTTDSMPPLVRQALELKDHQGAEPAFLFGLELIICGLEKQLKCESGS

SEQ ID NO: 256 - protein, 208 aa, Artificial Sequence
  Sulfonylurea responsive repressor L7-1G09
MGSRLDKSKVINSALELLNEVGIEGLTTRKLAQKLGVEQPTLYWHVKNKRALLDAMAIEMLDRHATHYCPLEGESWQDFLRNNAKSMRCALLSHRDGAKVCLGTGFTEQQYETAENSMAFLCQQGFSLENALYAMQAAGIYTLGCVLLDQELQVAKEERETPTTDSMPPLVRQGLELKDHQGAEPAFLFGLELIICGLEKQLKCESGS

SEQ ID NO: 257 - protein, 208 aa, Artificial Sequence
  Sulfonylurea responsive repressor L7-1A10
MGSRLDKSKVINSALELLNEVGIEGLTTRKLAQKLGVEQPTLYWHVKNKRALLDALAIEMLDRHATHYCPLEGESWQDFLRNNAKSMRCALLSHRDGAKVCLGTGFTEQMYESAENSMAFLCQQGFSLENAMYAMQAAGIYTLGCVLLDQELQVAKEERETPTTDSMPPLVRQGLELKDHQGAEPAFLFGLELIICGLEKQLKCESGS

SEQ ID NO: 258 - protein, 208 aa, Artificial Sequence
  Sulfonylurea responsive repressor L7-1B10
MGSRLDKSKVINSALELLNEVGIEGLTTRKLAQKLGVEQPTLYWHVKNKRALLDAMAIEMLDRHATHYCPLEGESWQDFLRNNAKSMRCALLSHRDGAKVCLGTGFTEQQYEGAENSMAFLCQQGFSLENAMYAMQAVGIFTLGCVLLDQELQVAKEERETPTTDSMPPLVRQALELKDHQGAEPAFLFGLELIICGLEKQLKCESGS

SEQ ID NO: 259 - protein, 208 aa, Artificial Sequence
  Sulfonylurea responsive repressor L7-1C10
  misc_feature (68)..(68): Xaa can be any naturally occurring amino acid
  misc_feature (110)..(110): Xaa can be any naturally occurring amino acid
  misc_feature (113)..(113): Xaa can be any naturally occurring amino acid
  misc_feature (132)..(132): Xaa can be any naturally occurring amino acid
MGSRLDKSKVINSALELLNEVGIEGLTTRKLAQKLGVEQPTLYWHVKNKRALLDALAIEMLDRHATHXCPLEGESWQDFLRNNAKSMRCALLSHRDGAKVCLGTGFTEQXYEXAENSMAFLCQQGFSLEHAXYAMQAAGIFTLGCVLLDQELQVAKEERETPTTDSMPPLLRQALELKDHQGAEPAFLFGLELIICGLEKQLKCESGS

SEQ ID NO: 260 - protein, 208 aa, Artificial Sequence
  Sulfonylurea responsive repressor L7-1D10
MGSRLDKSKVINSALELLNEVGIEGLTTRKLAQKLGVEQPTLYWHVKNKRALLDAMAIEMLDRHATHICPLEGESWQDFLRNNAKSMRCALLSHRDGAKVCLGTGFTEQQYETAENSLAFLCQQGFSLENALYAMQAAGIFTLGCVLLDQELQVAKEERETPTTDSMPPLVRQVLELKDHQGAEPAFLFGLELIICGLEKQLKCESGS

SEQ ID NO: 261 - protein, 208 aa, Artificial Sequence
  Sulfonylurea responsive repressor L7-1F10
  misc_feature (68)..(68): Xaa can be any naturally occurring amino acid
  misc_feature (113)..(113): Xaa can be any naturally occurring amino acid
  misc_feature (130)..(130): Xaa can be any naturally occurring amino acid
  misc_feature (139)..(139): Xaa can be any naturally occurring amino acid
  misc_feature (171)..(171): Xaa can be any naturally occurring amino acid
  misc_feature (174)..(174): Xaa can be any naturally occurring amino acid
MGSRLDKSKVINSALELLNEVGIEGLTTRKLAQKLGVEQPTLYWHVKNKRALLDALAIEMLDRHATHXCPLEGESWQDFLRNNAKSMRCALLSHRDGAKVCLGTGFTEQLYEXAENSLAFLCQQGFSLEXALYAMQAAXIYTLGCVLLDQELQVAKEERETPTTDSMPPLXRQXLELKDHQGAEPAFLFGLELIICGLEKQLKCESGS

SEQ ID NO: 262 - protein, 208 aa, Artificial Sequence
  Sulfonylurea responsive repressor L7-1A11
MGSRLDKSKVINSALELLNEVGIEGLTTRKLAQKLGVEQPTLYWHVKNKRALLDALAIEMLDRHATHYCPLEGESWQDFLRNNAKSMRCALLSHRDGAKVCLGTGFTEKQYESAENSLAFLCQQGFSLEHAMYAMQAAGIYTLGCVLLDQELQVAKEERETPTTDSMPPLVRQALELKDHQGAEPAFLFGLELIICGLEKQLKCESGS

SEQ ID NO: 263 - protein, 208 aa, Artificial Sequence
  Sulfonylurea responsive repressor L7-1B11
  misc_feature (171)..(171): Xaa can be any naturally occurring amino acid
MGSRLDKSKVINSALELLNEVGIEGLTTRKLAQKLGVEQPTLYWHVKNKRALLDAMAIEMLDRHATHYCPLEGESWQDFLRNNAKSMRCALLSHRDGAKVCLGTGFTEQQYESAENSMAFLCQQGFSLEHAMYAMQAAGIYTLGCVLLDQELQVAKEERETPTTDSMPPLXRQVLELKDHQGAEPAFLFGLELIICGLEKQLKCESGS

SEQ ID NO: 264 - protein, 208 aa, Artificial Sequence
  Sulfonylurea responsive repressor L7-1C11
  misc_feature (56)..(56): Xaa can be any naturally occurring amino acid
  misc_feature (118)..(118): Xaa can be any naturally occurring amino acid
  misc_feature (139)..(139): Xaa can be any naturally occurring amino acid
MGSRLDKSKVINSALELLNEVGIEGLTTRKLAQKLGVEQPTLYWHVKNKRALLDAXAIEMLDRHATHYCPLEGESWQDFLRNNAKSMRCALLSHRDGAKVCLGTGFTEQMYETAENSXAFLCQQGFSLEHAMYAMQAAXIYTLGCVLLDQELQVAKEERETPTTDSMPPLARQGLELKDHQGAEPAFLFGLELIICGLEKQLKCESGS

SEQ ID NO: 265 - protein, 208 aa, Artificial Sequence
  Sulfonylurea responsive repressor L7-1E11
  misc_feature (110)..(110): Xaa can be any naturally occurring amino acid
MGSRLDKSKVINSALELLNEVGIEGLTTRKLAQKLGVEQPTLYWHVKNKRALLDAMAIEMLDRHATHYCPLEGESWQDFLRNNAKSMRCALLSHRDGAKVCLGTGFTEQXYEAAENSMAFLCQQGFSLEHAMYAMQAAGIFTLGCVLLDQELQVAKEERETPTTDSMPPLVRQALELKDHQGAEPAFLFGLELIICGLEKQLKCESGS

SEQ ID NO: 266 - protein, 208 aa, Artificial Sequence
  Sulfonylurea responsive repressor L7-1A12
  misc_feature (68)..(68): Xaa can be any naturally occurring amino acid
MGSRLDKSKVINSALELLNEVGIEGLTTRKLAQKLGVEQPTLYWHVKNKRALLDAMAIEMLDRHATHXCPLEGESWQDFLRNNAKSMRCALLSHRDGAKVCLGTGFTEQQYEGAENSLAFLCQQGFSLEHAMYAMQAVGIYTLGCVLLDQELQVAKEERETPTTDSMPPLVRQGLELKDHQGAEPAFLFGLELIICGLEKQLKCESGS

SEQ ID NO: 267 - protein, 208 aa, Artificial Sequence
  Sulfonylurea responsive repressor L7-1C12
  misc_feature (110)..(110): Xaa can be any naturally occurring amino acid
  misc_feature (113)..(113): Xaa can be any naturally occurring amino acid
  misc_feature (141)..(141): Xaa can be any naturally occurring amino acid
  misc_feature (199)..(199): Xaa can be any naturally occurring amino acid
MGSRLDKSKVINSALELLNEVGIEGLTTRKLAQKLGVEQPTLYWHVKNKRALLDAMAIEMLDRHATHYCPLEGESWQDFLRNNAKSMRCALLSHRDGAKVCLGTGFTEQXYEXAENSLAFLCQQGFSLEHAMYAMQAAGIXTLGCVLLDQELQVAKEERETPTTDSMPPLARQGLELKDHQGAEPAFLFGLELIICGLXKQLKCESGS

SEQ ID NO: 268 - protein, 208 aa, Artificial Sequence
  Sulfonylurea responsive repressor L7-1F12
  misc_feature (154)..(154): Xaa can be any naturally occurring amino acid
  misc_feature (195)..(195): Xaa can be any naturally occurring amino acid
  misc_feature (199)..(199): Xaa can be any naturally occurring amino acid
MGSRLDKSKVINSALELLNEVGIEGLTTRKLAQKLGVEQPTLYWHVKNKRALLDAMAIEMLDRHATHYCPLEGESWQDFLRNNAKSMRCALLSHRDGAKVCLGTGFTEQQYESAENSMAFLCQQGFSLEHAMYAMQAAGIYTLGCVLLDQELQXAKEERETPTTDSMPPLLRQVLELNDHQGAEPAFLFGLELIXCGLXKQLKCESGS

SEQ ID NO: 269 - protein, 208 aa, Artificial Sequence
  Sulfonylurea responsive repressor L7-1G12
  misc_feature (93)..(93): Xaa can be any naturally occurring amino acid
  misc_feature (154)..(154): Xaa can be any naturally occurring amino acid
  misc_feature (161)..(161): Xaa can be any naturally occurring amino acid
  misc_feature (166)..(166): Xaa can be any naturally occurring amino acid
  misc_feature (173)..(173): Xaa can be any naturally occurring amino acid
  misc_feature (186)..(186): Xaa can be any naturally occurring amino acid
  misc_feature (195)..(195): Xaa can be any naturally occurring amino acid
  misc_feature (200)..(201): Xaa can be any naturally occurring amino acid
MGSRLDKSKVINSALELLNEVGIEGLTTRKLAQKLGVEQPTLYWHVKNKRALLDAMAIEMLDRHATHYCPLEGESWQDFLRNNAKSMRCALLXHRDGAKVCLGTGFTEQQYEGAENSLAFLCQQGFSLEHAMYAMQAAGIYTLGCVLLDQELQXAKEEREXPTTDXMPPLARXGLELKDHQGPEPXFLFGLELIXCGLEXXLKCESGS

SEQ ID NO: 270 - protein, 208 aa, Artificial Sequence
  Sulfonylurea responsive repressor L7-2A01
MGSRLDKSKVINSALELLNEVGIEGLTTRKLAQKLGVEQPTLYWHVKNKRALLDAMAIEMLDRHATHVCPLEGESWQDFLRNNAKSMRCALLSHRDGAKVCLGTGFTEQQYEGAENSMAFLCQQGFSLEHAMYAMQAVGIYTLGCVLLDQELQVAKEERETPTTDSMPPLVRQALELKDHQGAEPAFLFGLELIICGLEKQLKCGSGS

SEQ ID NO: 271 - protein, 208 aa, Artificial Sequence
  Sulfonylurea responsive repressor L7-2B01
  misc_feature (56)..(56): Xaa can be any naturally occurring amino acid
  misc_feature (68)..(68): Xaa can be any naturally occurring amino acid
  misc_feature (109)..(110): Xaa can be any naturally occurring amino acid
  misc_feature (118)..(118): Xaa can be any naturally occurring amino acid
  misc_feature (130)..(130): Xaa can be any naturally occurring amino acid
  misc_feature (139)..(139): Xaa can be any naturally occurring amino acid
  misc_feature (141)..(141): Xaa can be any naturally occurring amino acid
MGSRLDKSKVINSALELLNEVGIEGLTTRKLAQKLGVEQPTLYWHVKNKRALLDAXAIEMLDRHATHXCPLEGESWQDFLRNNAKSMRCALLSHRDGAKVCLGTGFTEXXYEGAENSXAFLCQQGFSLEXAMYAMQAAXIXTLGCVLLDQELQVAKEERETPTTDSMPPLARQVLELKDHQGAEPAFLFGLELIICGLEKQLKCESGS

SEQ ID NO: 272 - protein, 208 aa, Artificial Sequence
  Sulfonylurea responsive repressor L7-2D01
  misc_feature (109)..(110): Xaa can be any naturally occurring amino acid
  misc_feature (132)..(132): Xaa can be any naturally occurring amino acid
  misc_feature (138)..(138): Xaa can be any naturally occurring amino acid
  misc_feature (171)..(171): Xaa can be any naturally occurring amino acid
MGSRLDKSKVINSALELLNEVGIEGLTTRKLAQKLGVEQPTLYWHVKNKRALLDAMAIEMLDRHATHYCPLEGESWQDFLRNNAKSMRCALLSHRDGAKVCLGTGFTEXXYESAENSMAFLCQQGFSLEHAXYAMQAXGIYTLGCVLLDQELQVAKEERETPTTDSMPPLXRQALELKDHQGAEPAFLFGLELIICGLEKQLKCESGS

SEQ ID NO: 273 - protein, 208 aa, Artificial Sequence
  Sulfonylurea responsive repressor L7-2E01
MGSRLDKSKVINSALELLNEVGIEGLTTRKLAQKLGVEQPTLYWHVKNKRALLDALAIEMLDRHATHYCPLEGESWQDFLRNNAKSMRCALLSHRDGAKVCLGTGFTEKQYETAENSMAFLCQQGFSLENALYAMQAVGIYTLGCVLLDQELQVAKEERETPTTDSMPPLVRQALELKDHQGAEPAFLFGLELIICGLEKQLKCESGS

SEQ ID NO: 274 - protein, 208 aa, Artificial Sequence
  Sulfonylurea responsive repressor L7-2F01
MGSRLDKSKVINSALELLNEVGIEGLTTRKLAQKLGVEQPTLYWHVKNKRALLDALAIEMLDRHATHYCPLEGESWQDFLRNNAKSMRCALLSHRDGAKVCLGTGFTEQMYETAENSLAFLCQQGFSLEHAMYAMQAAGIFTLGCVLLDQELQVAKEERETPTTDSMPPLVRQVLELKDHQGAEPAFLFGLELIICGLEKQLKCESGS

SEQ ID NO: 275 - protein, 208 aa, Artificial Sequence
  Sulfonylurea responsive repressor L7-2G01
  misc_feature (109)..(109): Xaa can be any naturally occurring amino acid
MGSRLDKSKVINSALELLNEVGIEGLTTRKLAQKLGVEQPTLYWHVKNKRALLDAMAIEMLDRHATHYCPLEGESWQDFLRNNAKSMRCALLSHRDGAKVCLGTGFTEXLYESAENSLAFLCQQGFSLEHAMYAMQAVGIYTLGCVLLDQELQVAKEERETPTTDSMPPLVRQVLELKDHQGAEPAFLFGLELIICGLEKQLKCESGS

SEQ ID NO: 276 - protein, 208 aa, Artificial Sequence
  Sulfonylurea responsive repressor L7-2H01
MGSRLDKSKVINSALELLNEVGIEGLTTRKLAQKLGVEQPTLYWHVKNKRALLDALAIEMLDRHATHYCPLEGESWQDFLRNNAKSMRCALLSHRDGAKVCLGTGFTEQMYETAENSMAFLCQQGFSLEHALYAMQAAGIFTLGCVLLDQELQVAKEERETPTTDSMPPLVRQALELKDHQGAEPAFLFGLELIICGLEKQLKCESGS

SEQ ID NO: 277 - protein, 208 aa, Artificial Sequence
  Sulfonylurea responsive repressor L7-2B02
MGSRLDKSKVINSALELLNEVGIEGLTTRKLAQKLGVEQPTLYWHVKNKRALLDAMAIEMLDRHATHYCPLEGESWQDFLRNNAKSMRCALLSHRDGAKVCLGTGFTEQMYESAENSLAFLCQQGFSLENALYAMQAVGIYTLGCVLLDQELQVAKEERETPTTDSMPPLVRQVLELKDHQGAEPAFLFGLELIICGLEKQLKCESGS

SEQ ID NO: 278 - protein, 208 aa, Artificial Sequence
  Sulfonylurea responsive repressor L7-2D02
MGSRLDKSKVINSALELLNEVGIEGLTTRKLAQKLGVEQPTLYWHVKNKRALLDAMAIEMLDRHATHFCPLEGESWQDFLRNNAKSMRCTLLSHRDGAKVCLGTGFTEQQYESAENSLAFLCQQGFSLENAMYAMQAVGIYTLGCVLLDQELQVAKEERETPTTDSMPPLVRQALELKDHQGAEPAFLFGLELIICGLEKQLKCESGS

SEQ ID NO: 279 - protein, 208 aa, Artificial Sequence
  Sulfonylurea responsive repressor L7-2E02
MGSRLDKSKVINSALELLNEVGIEGLTTRKLAQKLGVEQPTLYWHVKNKRALLDALAIEMLDRHATHICPLEGESWQDFLRNNAKSMRCALLSHRDGAKVCLGTGFTEQMYEAAENSMAFLCQQGFSLENAMYAMQAAGIYTLGCVLLDQELQVAKEERETPTTDSMPPLVRQALELKDHQGAEPAFLFGLELIICGLEKQLKCESGS

SEQ ID NO: 280 - protein, 208 aa, Artificial Sequence
  Sulfonylurea responsive repressor L7-2F02
MGSRLDKSKVINSALELLNEVGIEGLTTRKLAQKLGVEQPTLYWHVKNKRALLDAMAIEMLDRHATHYCPLEGESWQDFLRNNAKSMRCALLSHRDGAKVCLGTGFTEQHYETAENSLAFLCQQGFSLENAMYAMQAAGIYTLGCVLLDQELQVAKEERETPTTDSMPPLVRQVLELKDHQGAEPAFLFGLELIICGLEKQLKCESGS

SEQ ID NO: 281 - protein, 208 aa, Artificial Sequence
  Sulfonylurea responsive repressor L7-2G02
MGSRLDKSKVINSALELLNEVGIEGLTTRKLAQKLGVEQPTLYWHVKNKRALLDAMAIEMLDRHATHLCPLEGESWQDFLRNNAKSMRCALLSHRDGAKVCLGTGFTEQQYETAENSMAFLCQQGFSLEHAMYAMQAAGIYTLGCVLLDQELQVAKEERETPTTDSMPPLVRQGLELKDHQGAEPAFLFGLELIICGLEKQLKCESGS

SEQ ID NO: 282 - protein, 208 aa, Artificial Sequence
  Sulfonylurea responsive repressor L7-2H02
MGSRLDKSKVINSALELLNEVGIEGLTTRKLAQKLGVEQPTLYWHVKNKRALLDALAIEMLDRHATHFCPLEGESWQDFLRNNAKSMRCALLSHRDGAKVCLGTGFTEQMYEAAENSMAFLCQQGFSLEHAMYAMQAVCIYTLGCVLLDQELQVAKEERETPTTDSMPPLARQGLELKDHQGAEPAFLFGLELIICGLEKQLKCESGS

SEQ ID NO: 283 - protein, 208 aa, Artificial Sequence
  Sulfonylurea responsive repressor L7-2D03
MGSRLDKSKVINSALELLNEVGIEGLTTRKLAQKLGVEQPTLYWHVKNKRALLDALAIEMLDRHATHYCPLEGESWQDFLRNNAKSMRCALLSHRDGAKVCLGTGFTEQHYETAENSLAFLCQQGFSLENAMYAMQAVGIFTLGCVLLDQELQVAKEERETPTTDSMPPLVRQVLELKDHQGAEPAFLFGLELIICGLEKQLKCESGS

SEQ ID NO: 284 - protein, 208 aa, Artificial Sequence
  Sulfonylurea responsive repressor L7-2E03
MGSRLDKSKVINSALELLNEVGIEGLTTRKLAQKLGVEQPTLYWHVKNKRALLDAMAIEMLDRHATHYCPLEGESWQDFLRNNAKSMRCALLSHRDGAKVCLGTGFTEQQYESAENSLAFLCQQGFSLENAMYAMQAAGIYTLGCVLLDQELQVAKEERETPTTDSMPPLVRQALELKDHQGAEPAFLFGLELIICGLEKQLKCESGS

SEQ ID NO: 285 - protein, 208 aa, Artificial Sequence
  Sulfonylurea responsive repressor L7-2F03
MGSRLDKSKVINSALELLNEVGIEGLTTRKLAQKLGVEQPTLYWHVKNKRALLDAMAIEMLDRHATHYCPLEGESWQDFLRNNAKSMRCALLSHRDGAKVCLGTGFTEQQYEAAENSLAFLCQQGFSLENALYAMQAVGIYTLGCVLLDQELQVAKEERETPTTDSMPPLARQALELKDHQGAEPAFLFGLELIICGLEKQLKCESGS

SEQ ID NO: 286 - protein, 208 aa, Artificial Sequence
  Sulfonylurea responsive repressor L7-2G03
MGSRLDKSKVINSALELLNEVGIEGLTTRKLAQKLGVEQPTLYWHVKNKRALLDAMAIEMLDRHATHFCPLEGESWQDFLRNNAKSMRCALLSHRDGAKVCLGTGFTEQQYEAAENSMAFLCQQGFSLEHALYAMQAVGIFTLGCVLLDQELQVAKEERETPTTDSMPPLVRQGLELKDHQGAEPAFLFGLELIICGLEKQLKCESGS

SEQ ID NO: 287 - protein, 208 aa, Artificial Sequence
  Sulfonylurea responsive repressor L7-2H03
MGSRLDKSKVINSALELLNEVGIEGLTTRKLAQKLGVEQPTLYWHVKNKRALLDALAIEMLDRHATHYCPLEGESWQDFLRNNAKSMRCALLSHRDGAKVCLGTGFTEQMYETAENSMAFLCQQGFSLENAMYAMQAVGIFTLGCVLLDQELQVAKEERETPTTDSMPPLVRQVLELKDHQGAEPAFLFGLELIICGLEKQLKCESGS

SEQ ID NO: 288 - protein, 208 aa, Artificial Sequence
  Sulfonylurea responsive repressor L7-2D04
MGSRLDKSKVINSALELLNEVGIEGLTTRKLAQKLGVEQPTLYWHVKNKRALLDALAIEMLDRHATHYCPLEGESWQDFLRNNAKSMRCALLSHRDGAKVCLGTGFTEKQYESAENSLAFLCQQGFSLEHALYAMQAVGIYTLGCVLLDQELQVAKEERETPTNDSMPPLVRQVLELKDHQGAEPAFLFGLELIICGLEKQLKCESGS

SEQ ID NO: 289 - protein, 208 aa, Artificial Sequence
  Sulfonylurea responsive repressor L7-2E04
MGSRLDKSKVINSALELLNEVGIEGLTTRKLAQKLGVEQPTLYWHVKNKRALLDAMAIEMLDRHATHYCPLEGESWQDFLRNNAKSMRCALLSHRDGAKVCLGTGFTEQQYETAENSMAFLCQQGFSLENAMYAMQAACIYTLGCVLLDQELQVAKEERETPTTDSMPPLVRQVLELKDHQGAEPAFLFGLELIICGLEKQLKCESGS

SEQ ID NO: 290 - protein, 208 aa, Artificial Sequence
  Sulfonylurea responsive repressor L7-2F04
MGSRLDKSKVINSALELLNEVGIEGLTTRKLAQKLGVEQPTLYWHVKNKRALLDALAIEMLDRHATHYCPLEGESWQDFLRNNAKSMRCALLSHRDGAKVCLGTGFTEQMYETAENSMAFLCQQGFSLEHAMYAMQAVGIFTLGCVLLDQELQVAKEERETPTTDSMPPLVRQALELKDHQGAEPAFLFGLELIICGLEKQLKCESGS

SEQ ID NO: 291 - protein, 208 aa, Artificial Sequence
  Sulfonylurea responsive repressor L7-2H04
MGSRLDKSKVINSALELLNEVGIEGLTTRKLAQKLGVEQPTLYWHVKNKRALLDAMAIEMLDRHATHICPLEEESWQDFLRNNAKSMRCALLSHRDGAKVCLGTGFTEQQYETAENSMAFLCQQGFSLEHAMYAMQAACIYTLGCVLLDQELQVAKEERETPTTDSMPPLVRQVLELKDHQGAEPAFLFGLELIICGLEKQLKCESGS

SEQ ID NO: 292 - protein, 208 aa, Artificial Sequence
  Sulfonylurea responsive repressor L7-2B05
MGSRLDKSKVINSALELLNEVGIEGLTTRKLAQKLGVEQPTLYWHVKNKRALLDAMAIEMLDRHATHYCPLEGESWQDFLRNNAKSMRCALLSHRDGAKVCLGTGFTEQHYETAENSMAFLCQQGFSLEHAMYAMQAAGIYTLGCVLLDQELQVAKEERETPTTDSMPPLVRQALELKDHQGAEPAFLFGLELIICGLEKQLKCESGS

SEQ ID NO: 293 - protein, 208 aa, Artificial Sequence
  Sulfonylurea responsive repressor L7-2D05
MGSRLDKSKVINSALELLNEVGIEGLTTRKLAQKLGVEQPTLYWHVKNKRALLDAMAIEMLDRHATHYCPLEGESWQDFLRNNARSMRCALLSHRDGAKVCLGTGFTEQMYETAENSLAFLCQQGFSLENAMYAMQAAGIYTLGCVLLDQELQVAKEERETPTTDSMPPLVRQVLELKDHQGAEPAFLFGLELIICGLEKQLKCESGS

SEQ ID NO: 294 - protein, 208 aa, Artificial Sequence
  Sulfonylurea responsive repressor L7-2E05
MGSRLDKSKVINSALELLNEVGIEGLTTRKLAQKLGVEQPTLYWHVKNKRALLDAMAIEMLDRHATHYCPLEGESWQDFLRNNAKSMRCALLSHRDGAKVCLGTGFTEQQYESAENSLAFLCQQGFSLENALYAMQAVGIYTLGCVLLDQELQVAKEERETPTTDSMPPLLRQALELKDHQGAEPAFLFGLELIICGLEKQLKCESGS

SEQ ID NO: 295 - protein, 208 aa, Artificial Sequence
  Sulfonylurea responsive repressor L7-2F05
MGSRLDKSKVINSALELLNEVGIEGLTTRKLAQKLGVEQPTLYWHVKNKRALLDALAIEMLDRHATHYCPLEGESWQDFLRNNAKSMRCALLSHRDGAKVCLGTGFTEKQYESAENSMAFLCQQGFSLEHALYAMQAVGIFTLGCVLLDQELQVAKEERETPTTDSMPPLVRQVLELKDHQGAEPAFLFGLELIICGLEKQLKCESGS

SEQ ID NO: 296 - protein, 208 aa, Artificial Sequence
  Sulfonylurea responsive repressor L7-2H05
MGSRLDKSKVINSALELLNEVGIEGLTTRKLAQKLGVEQPTLYWHVKNKRALLDAMAIEMLDRHATHYCPLEGESWQDFLRNNAKSMRCALLSHRDGAKVCLGTGFTEQQYESAENSMAFLCQQGFSLEHALYAMQAAGIYTLGCVLLNQELQVAKEERETPTTDSMPPLVRQGLELKDHQGAEPAFLFGLELIICGLEKQLKCESGS

SEQ ID NO: 297 - protein, 208 aa, Artificial Sequence
  Sulfonylurea responsive repressor L7-2A06
MGSRLDKSKVINSALELLNEVGIEGLTTRKLAQKLGVEQPTLYWHVKNKRALLDAMAIEMLDSHATHYCPLEGESWQDFLRNNAKSMRCALLSHRDGAKVCLGTGFTEQQYETAENSMAFLCQQGFSLEHAMYAMQAAGIFTLGCVLLDQELQVAKEERETPTTDSMPPLVRQGLELKDHQGAEPAFLFGLELIICGLEKQLKCESGS

SEQ ID NO: 298 - protein, 208 aa, Artificial Sequence
  Sulfonylurea responsive repressor L7-2C06
MGSRLDKSKVINSALELLNEVGIEGLTTRKLAQKLGVEQPTLYWHVKNKRALLDAMAIEMLDRHATHYCPLEGESWPDFLRNNAKSMRCALLSHRDGAKVCLGTGFTEQQYETAENSLAFLCQQGFSLEHALYAMQAVGIYTLGCVLLDQELQVAKEERETPTTDSMPPLLRQGLELKDHQGAEPAFLFGLELIICGLEKQLKCESGS

SEQ ID NO: 299 - protein, 208 aa, Artificial Sequence
  Sulfonylurea responsive repressor L7-2D06
MGSRLDKSKVINSALELLNEVGIEGLTTRKLAQKLGVEQPTLYWHVKNKRALLDAMAIEMLDRHATHYCPLEGESWQDFLRNNAKSMRCALLSHRDGAKVCLGTGFTEQQYESAENSLAFLCQQGFSLENALYAMQAVGIFTLGCVLLDQELQVAKEERETPTTDSMPPLVRQALELKDHQGAEPAFLFGLELIICGLEKQLKCESGS

SEQ ID NO: 300 - protein, 208 aa, Artificial Sequence
  Sulfonylurea responsive repressor L7-2F06
MGSRLDKSKVINSALELLNEVGIEGLTTRKLAQKLGVEQPTLYWHVKNKRALLDALAIEMLDRHATHYCPLEGESWQDFLRNNAKSMRCALLSHRDGAKVCLGTGFTEKQYETAENSLAFLCQQGFSLEHALYAMQAVGIYTLGCVLLDQELQVAKEERETPTTDSMPPLVRQGLELKDHQGAEPAFLFGLELIICGLEKQLKCESGS

SEQ ID NO: 301 - protein, 208 aa, Artificial Sequence
  Sulfonylurea responsive repressor L7-2G06
MGSRLDKSKVINSALELLNEVGIEGLTTRKLAQKLGVEQPTLYWHVKNKRALLDAMAIEMLDRHATHYCPLEGESWQDFLRNNAKSMRCALLSHRDGAKVCLGTGFTEQQYETAENSMAFLCQQGFSLEHALYAMQAVGIYTLGCVLLDQELQVAKEERETPTTDSMPPLVRQGLELKDHQGAEPAFLFGLELIICGLEKQLKCESGS

SEQ ID NO: 302 - protein, 208 aa, Artificial Sequence
  Sulfonylurea responsive repressor L7-2A07
  misc_feature (110)..(110): Xaa can be any naturally occurring amino acid
  misc_feature (141)..(141): Xaa can be any naturally occurring amino acid
  misc_feature (174)..(174): Xaa can be any naturally occurring amino acid
MGSRLDKSKVINSALELLNEVGIEGLTTRKLAQKLGVEQPTLYWHVKNKRALLDAMAIEMLDRHATHYCPLEGESWQDFLRNNAKSMRCALLSHRDGAKVCLGTGFTEQXYEAAENSLAFLCQQGFSLEHALYAMQAVGIXTLGCVLLDQELQVAKEERETPTTDSMPPLVRQXLELKDHQGAEPAFLFGLELIICGLEKQLKCESGS

SEQ ID NO: 303 - protein, 208 aa, Artificial Sequence
  Sulfonylurea responsive repressor L7-2B07
MGSRLDKSKVINSALELLNEVGIEGLTTRKLAQKLGVEQPTLYWHVKNKRALLDALAIEMLDRHATHYCPLEGESWQDFLRNNAKSMRCALLSHRDGAKVCLGTGFTEQHYETAENSMAFLCQQGFSLEHAMYAMQAAGIFTLGCVLLDQELQVAKEERETPTTDSMPPLVRQGLELKDHQGAEPAFLFGLELIICGLEKQLKCESGS

SEQ ID NO: 304 - protein, 208 aa, Artificial Sequence
  Sulfonylurea responsive repressor L7-2C07
MGSRLDKSKVINSALELLNEVGIEGLTTRKLAQKLGVEQPTLYWHVKNKRALLDAMAIEMLDRHATHYCPLEGESWQDFLRNNAKSMRCALLSHRDGAKVCLGTGFTEQQYETAENSLAFLCQQGFSLEHAMYAMQAVGIFTLGCVLLDQELQVAKEERETPTTDSMPPLVRQGLELKDHQGAEPAFLFGLELIICGLEKQLKCESGS

SEQ ID NO: 305 - protein, 208 aa, Artificial Sequence
  Sulfonylurea responsive repressor L7-2D07
MGSRLDKSKVINSALELLNEVGIEGLTTRKLAQKLGVEQPTLYWHVKNKRALLDALAIEMLDRHATHYCPLEGESWQDFLRNNAKSMRCALLSHRDGAKVCLGTGFTEKQYETAENSLAFLCQQGFSLENALYAMQAAGIYTLGCVLLDQELQVAKEERETPTTDSMPPLVRQVLELKDHQGAEPAFLFGLELIICGLEKQLKCESGS

SEQ ID NO: 306 - protein, 208 aa, Artificial Sequence
  Sulfonylurea responsive repressor L7-2E07
MGSRLDKSKVINSALELLNEVGIEGLTTRKLAQKLGVEQPTLYWHVKNKRALLDALAIEMLDRHATHYCPLEGESWQDFLRNNAKSMRCALLSHRDGAKVCLGTGFTEQQYEAAENSMAFLCQQGFSLEHAMYAMQAAGIYTLGCVLLDQELQVAKEERETPTTDSMPPLLRQALELKDHQGAEPAFLFGLELIICGLEKQLKCESGS

SEQ ID NO: 307 - protein, 208 aa, Artificial Sequence; identical to SEQ ID NO: 296
  Sulfonylurea responsive repressor L7-2G07

SEQ ID NO: 308 - protein, 208 aa, Artificial Sequence
  Sulfonylurea responsive repressor L7-2B08
  misc_feature (68)..(68): Xaa can be any naturally occurring amino acid
  misc_feature (113)..(113): Xaa can be any naturally occurring amino acid
  misc_feature (130)..(130): Xaa can be any naturally occurring amino acid
  misc_feature (171)..(171): Xaa can be any naturally occurring amino acid
MGSRLDKSKVINSALELLNEVGIEGLTTRKLAQKLGVEQPTLYWHVKNKRALLDAMAIEMLDRHATHXCPLEGESWQDFLRNNAKSMRCALLSHRDGAKVCLGTGFTEQMYEXAENSMAFLCQQGFSLEXAMYAMQAVGIFTLGCVLLDQELQVAKEERETPTTDSMPPLXRQVLELKDHQGAEPAFLFGLELIICGLEKQLKCESGS

SEQ ID NO: 309 - protein, 208 aa, Artificial Sequence
  Sulfonylurea responsive repressor L7-2D08
MGSRLDKSKVINSALELLNEVGIEGLTTRKLAQKLGVEQPTLYWHVKNKRALLDAMAIEMLDRHATHYCPLEGESWQDFLRNNAKSMRCALLSHRDGAKVCLGTGFTEQQYETAENSLAFLCQQGFSLEHALYAMQAVGIYTLGCVLLDQELQVAKEERETPTTDSMPPLVRQALELKDHQGAEPAFLFGLELIICGLEKQLKCESGS

SEQ ID NO: 310 - protein, 208 aa, Artificial Sequence
  Sulfonylurea responsive repressor L7-2F08
MGSRLDKSKVINSALELLNEVGIEGLTTRKLAQKLGVEQPTLYWHVKNKRALLDAMAIEMLDRHATHYCPLEGESWQDFLRNNAKSMRCALLSHRDGAKVCLGTGFTEQQYETAENSMAFLCQQGFSLEHAMYAMQAACIFTLGCVLLDQELQVAKEERETPTTDSMPPLVRQVLELKDHQGAEPAFLFGLELIICGLEKQLKCESGS

SEQ ID NO: 311 - protein, 208 aa, Artificial Sequence
  Sulfonylurea responsive repressor L7-2G08
MGSRLDKSKVINSALELLNEVGIEGLTTRKLAQKLGVEQPTLYWHVKNKRALLDALAIEMLDRHATHYCPLEGESWQDFLRNNAKSMRCALLSHRDGAKVCLGTGFTEQMYETAENSLAFLCQQGFSLEHALYAMQAVGIFTLGCVLLDQELQVAKEERETPTTDSMPPLVRQGLELKDHQGAEPAFLFGLELIICGLEKQLKCESGS

SEQ ID NO: 312 - protein, 208 aa, Artificial Sequence
  Sulfonylurea responsive repressor L7-2B09
MGSRLDKSKVINSALELLNEVGIEGLTTRKLAQKLGVEQPTLYWHVKNKRALLDAMAIEMLDRHATHMCPLEGESWQDFLRNNAKSMRCALLSHRDGAKVCLGTGFTEQMYESAENSMAFLCQQGFSLENAMYAMQAVGIFTLGCVLLDQELQVAKEERETPTTDSMPPLARQVLELKDHQGAEPAFLFGLELIICGLEKQLKCESGS

SEQ ID NO: 313 - protein, 208 aa, Artificial Sequence
  Sulfonylurea responsive repressor L7-2C09
MGSRLDKSKVINSALELLNEVGIEGLTTRKLAQKLGVEQPTLYWHVKNKRALLDAMAIEMLDRHATHMCPLEGESWQDFLRNNAKSMRCALLSHRDGAKVCLGTGFTEQMYETAENSMAFLCQQGFSLENAMYAMQAAGIYTLGCVLLDQELQVAKEERETPTTDSMPPLVRQVLELKDHQGAEPAFLFGLELIICGLEKQLKCESGS

SEQ ID NO: 314 - protein, 208 aa, Artificial Sequence
  Sulfonylurea responsive repressor L7-2E09
MGSRLDKSKVINSALELLNEVGIEGLTTRKLAQKLGVEQPTLYWHVKNKRALLDALAIEMLDRHATHYCPLEGESWQDFLRNNAKSMRCALLSHRDGAKVCLGTGFTEQMYESAENSLAFLCQQGFSLENAMYAMQAAGIFTLGCVLLDQELQVAKEERETPTTDSMPPLVRQVLELKDHQGAEPAFLFGLELIICGLEKQLKCESGS

SEQ ID NO: 315 - protein, 208 aa, Artificial Sequence
  Sulfonylurea responsive repressor L7-2B10
MGSRLDKSKVINSALELLNEVGIEGLTTRKLAQKLGVEQPTLYWHVKNKRALLDAMAIEMLDRHATHFCPLEGESWQDFLRNNAKSMRCALLSHRDGAKVCLGTGFTEQQYEGAENSMAFLCQQGFSLENAMYAMQAAGIFTLGCVLLDQELQVAKEERETPTTDSMPPLVRQVLELKDHQGAEPAFLFGLELIICGLEKQLKCESGS

SEQ ID NO: 316 - protein, 208 aa, Artificial Sequence
  Sulfonylurea responsive repressor L7-2E10
  misc_feature (6)..(6): Xaa can be any naturally occurring amino acid
  misc_feature (82)..(82): Xaa can be any naturally occurring amino acid
  misc_feature (110)..(110): Xaa can be any naturally occurring amino acid
  misc_feature (130)..(130): Xaa can be any naturally occurring amino acid
  misc_feature (174)..(174): Xaa can be any naturally occurring amino acid
MGSRLXKSKVINSALELLNEVGIEGLTTRKLAQKLGVEQPTLYWHVKNKRALLDALAIEMLDRHATHYCPLEGESWQDFLRXNAKSMRCALLSHRDGAKVCLGTGFTEQXYETAENSLAFLCQQGFSLEXALYAMQAVGIYTLGCVLLDQELQVAKEERETPTTDSMPPLLRQXLELKDHQGAEPAFLFGLELIICGLEKQLKCESGS

SEQ ID NO: 317 - protein, 208 aa, Artificial Sequence
  Sulfonylurea responsive repressor L7-2G10
MGSRLDKSKVINSALELLNEVGIEGLTTRKLAQKLGVEQPTLYWHVKNKRALLDAMAIEMLDRHATHYCPLEGESWQDFLRNNAKSMRCALLSHRDGAKVCLGTGFTEQQYETAENSMAFLCQQGFSLEHALYAMQAAGIYTLGCVLLDQELQVAKEERETPTTDSMPPLLRQGLELKDHQGAEPAFLFGLELIICGLEKQLKCESGS

SEQ ID NO: 318 - protein, 208 aa, Artificial Sequence
  Sulfonylurea responsive repressor L7-2C11
MGSRLDKSKVINSALELLNEVGIEGLTTRKLAQKLGVEQPTLYWHVKNKRALLDAMAIEMLDRHATHYCPLEGESWQDFLRNNAKSMRCALLSHRDGAKVCLGTGFTEQQYETAENSMAFLCQQGFSLENAMYAMQAAGIFTLGCVLLDQELQVAKEERETPTTDSMPPLVRQVLELKDHQGAEPAFLFGLELIICGLEKQLKCESGS

SEQ ID NO: 319 - protein, 208 aa, Artificial Sequence
  Sulfonylurea responsive repressor L7-2D11
MGSRLDKSKVINSALELLNEVGIEGLTTRKLAQKLGVEQPTLYWHVKNKRALLDAMAIEMLDRHATHYCPLEGESWQDFLRNNARSMRCALLSHRDGAKVCLGTGFTEQMYETAENSLAFLCQQGFSLENALYAMQAAGIYTLGCVLLDQELQVAKEERETPTTDSMPPLVRQVLELKDHQGAEPAFLFGLELIICGLEKQLKCESGS

SEQ ID NO: 320 - protein, 208 aa, Artificial Sequence
  Sulfonylurea responsive repressor L7-2F11
MGSRLDKSKVINSALELLNEVGIEGLTTRKLAQKLGVEQPTLYWHVKNKRALLDALAIEMLDRHATHYCPLEGESWQDFLRNNAKSMRCALLSHRDGAKVCLGTGFTEQMYETAENSLAFLCQQGFSLENALYAMQAAGIFTLGCVLLDQELQVAKEERETPTTDSMPPLVRQALELKDHQGAEPAFLFGLELIICGLEKQLKCESGS

SEQ ID NO: 321 - protein, 208 aa, Artificial Sequence
  Sulfonylurea responsive repressor L7-2G11
MGSRLDKSKVINSALELLNEVGIEGLTTRKLAQKLGVEQPTLYWHVKNKRALLDAMAIEMLDRHATHYCPLEGESWQDFLRNNAKSMRCALLSHRDGAKVCLGTGFTEQQYESAENSMAFLCQQGFSLEHAMYAMQAAGIYTLGCVLLDQELQVAKEERETPTTDSMPPLLRQVLELNDHQGAEPAFLFGLELIICGLEKQLKCESGS

SEQ ID NO: 322 - protein, 208 aa, Artificial Sequence; identical to SEQ ID NO: 321
  Sulfonylurea responsive repressor L7-2B12

SEQ ID NO: 323 - protein, 208 aa, Artificial Sequence
  Sulfonylurea responsive repressor L7-2C12
MGSRLDKSKVINSALELLNEVGIEGLTTRKLAQKLGVEQPTLYWHVKNKRALLDAMAFEMLDRHATHYCPLEGESWQDFLRNNAKSMRCALLSHRDGAKVCLGTGFTEQQYETAENSMAFLCQQGFSLENALYAMQAVCIYTLGCVLLDQELQVAKEERETPTTDSMPPLLRQALEIKDHQGAEPAFLFGLELIICGLEKQLKCESGS

SEQ ID NO: 324 - protein, 208 aa, Artificial Sequence
  Sulfonylurea responsive repressor L7-2D12
MGSRLDKSKVINSALELLNEVGIEGLTTRKLAQKLGVEQPTLYWHVKNKRALLDAMAIEMLDRHATHYCPLEGESWQDFLRNNAKSMRCALLSHRDGAKVCLGTGFTEQQYETAENSLAFLCQQGFSLEHALYAMQAVGIYTLGCVLLDQELQVAKEERETPTTDSMPPLVRQGLELKDHQGAEPAFLFGLELIICGLEKQLKCESGS

SEQ ID NO: 325 - protein, 208 aa, Artificial Sequence
  Sulfonylurea responsive repressor L7-2F12
MGSRLDKSKVINSALELLNEVGIEGLTTRKLAQKLGVEQPTLYWHVKNKRALLDALAIEMLDRHATHVCPLEGESWQDFLRNTAKSMRCALLSHRDGAKVCLGTGFTEQQYEAAENSMAFLCQQGFSLEHALYAMQAAGIFTLGCVLLDQELQVAKEERETPTTDSMPPLVRQVLELKDHQGAEPAFLFGLELIICGLEKQLKCESGS

SEQ ID NO: 326 - protein, 208 aa, Artificial Sequence
  Sulfonylurea responsive repressor L7-2G12
MGSRLDKSKVINSALELLNEVGIEGLTTRKLAQKLGVEQPTLYWHVKNKRALLDAMAIEMLDRHATHICPLEGESWQDFLRNNAKSMRCALLSHRDGAKVCLGTGFTEQQYEAAENSLAFLCQQGFSLEHALYAMQAVGIYTLGCVLLDQELQVAKEERETPTTDSMPPLVRQALELKDHQGAEPAFLFGLELIICGLEKQLKCESGS

SEQ ID NO: 327 - protein, 208 aa, Artificial Sequence
  Sulfonylurea responsive repressor L7-3A01
MGSRLDKSKVINSALELLNEVGIEGLTTRKLAQKLGVEQPTLYWHVKNKRALLDALAIEMLDRHATHYCPLEGESWQDFLRNNAKSMRCALLSHRDGAKVCLGTGFTEKQYETAENSLAFLCQQGFSLENALYAMQAVGIFTLGCVLLDQELQVAKEERETPTTDSMPPLVRQALELKDHQGAEPAFLFGLELIICGLEKQLKCESGS

SEQ ID NO: 328 - protein, 208 aa, Artificial Sequence
  Sulfonylurea responsive repressor L7-3C01
MGSRLDKSKVINSALELLNEVGIEGLTTRKLAQKLGVEQPTLYWHVKNKRALLDAMAIEMLDRHATHLCPLEGESWQDFLRNNAKSMRSALLIHRDGAKVCLGTGFTEQQYEAAENSMAFLCQQGFSLENAMYAMQAVGIYTLGCVLLDQELQVAKEERETPTTDRMPPLARQALELKDHQGAEPAFLFGLELIICGLEKQLKCESGS

SEQ ID NO: 329 - protein, 208 aa, Artificial Sequence
  Sulfonylurea responsive repressor L7-3G01
MGSRLDKSKVINSALELLNEVGIEGLTTRKLAQKLGVEQPTLYWHVKNKRALLDAMAIEMLDRHATHYCPLEGESWQDFLRNNAKSMRCALLSHRDGAKVCLGTGFTEQQYEAAENSLAFLCQQGFSLENAMYAMQAAGIYTLGCVLLDQELQVAKEERETPTTDSMPPLVRQGLELKDHQGAEPAFLFGLELIICGLEKQLKCESGS

SEQ ID NO: 330 - protein, 208 aa, Artificial Sequence
  Sulfonylurea responsive repressor L7-3H01
MGSRLDKSKVINSALELLNEVGIEGLTTRKLAQKLGVEQPTLYWHVKNKRALLDAMAIEMLDRHATHYCPLEGESWQDFLRNNAKSMRCALLSHRDGAKVCLGTGFTEQQYEAAENSMAFLCQQGFSLENAMYSMQAVGIFTLGCVLLDQELQVAKEERETPTTDSMPPLVRQGLELKDHQGAEPAFLFGLELIICGLEKQLKCESGS

SEQ ID NO: 331 - protein, 208 aa, Artificial Sequence
  Sulfonylurea responsive repressor L7-3A02
MGSRLDKSKVINSALELLNEVGIEGLTTRKLAQKLGVEQPTLYWHVKNKRALLDALAIEMLDRHATHYCPLEGESWQDFLRNNAKSMRCALLSHRDGAKVCLGTGFTEKQYESAENSLAFLCQQGFSLEHALYAMQAVGIYTLGCVLLDQELQVAKEERETPTTDSMPPLVRQALELKDHQGAEPAFLFGLELIICGFEKQLKCESGS

SEQ ID NO: 332 - protein, 208 aa, Artificial Sequence
  Sulfonylurea responsive repressor L7-3B02
  misc_feature (110)..(110): Xaa can be any naturally occurring amino acid
  misc_feature (171)..(171): Xaa can be any naturally occurring amino acid
MGSRLDKSKVINSALELLNEVGIEGLTTRKLAQKLGVEQPTLYWHVKNKRALLDAMAIEMLDRHATHYCPLEGESWQDFLRNNAKSMRCALLSHRDGAKVCLGTGFTEQXYETAENSMAFLCQQGFSLENALYAMQAAGIYTLGCVLLDQELQVAKEERETPTTDSMPPLXRQALELKDHQGAEPAFLFGLELIICGLEKQLKCESGS

SEQ ID NO: 333 - protein, 208 aa, Artificial Sequence
  Sulfonylurea responsive repressor L7-3D02
MGSRLDKSKVINSALELLNEVGIEGLTTRKLAQKLGVEQPTLYWHVKNKRALLDAMAIEMLDRHATHYCPLEGESWQDFLRNNAKSMRCALLSHRDGAKVCLGTGFTEQQYETAENSMAFLCQQGFSLENAMYAMQAAGIFTLGCVLLDQELRVAKEERETPTTDSMPPLLRQVLELKDHQGAEPAFLFGLELIICGLEKQLKCESGS

SEQ ID NO: 334 - protein, 208 aa, Artificial Sequence
  Sulfonylurea reponsive repressor L7-3G02
MGSRLDKSKVINSALELLNEVGIEGLTTRKLAQKLGVEQPTLYWHVKNKRALLDAMAIEMLDRHATHYCPLEGESWQDFLRNNAKSMRCALLSHRDGAKVCLGTGFTEQQYETAENSLAFLCQQGFSLENAMYAMQAVGIFTLGCVLLDQELQVAKEERETPTTDSMPPLLRQVLELKDHQGAEPAFLFGLELIICGLEKQLKCESGS

SEQ ID NO: 335 - protein, 208 aa, Artificial Sequence
  Suflonylurea responsive repressor L7-3H02
MGSRLDKSKVINSALELLNEVGIEGLTTRKLAQKLGVEQPTLYWHVKNKRALLDAMAIEMLDRHATHYCPLEGESWQDFLRNNAKSMRCALLSHRDGAKVCLGTGFTEQQYEGAENSMAFLCQQGFSLENALYAMQAVGIYTLGCVLLDQELQVAKEERETPTTDSMPSLVRQVLELKDHQGAEPAFLFGLELIICGLEKQLKCESGS

SEQ ID NO: 336 - protein, 208 aa, Artificial Sequence
  Sulfonylurea responsive repressor L7-3B03
  misc_feature (56)..(56): Xaa can be any naturally occurring amino acid
  misc_feature (113)..(113): Xaa can be any naturally occurring amino acid
MGSRLDKSKVINSALELLNEVGIEGLTTRKLAQKLGVEQPTLYWHVKNKRALLDAXAIEMLDRHATHYCPLEGESWQDFLRNNAKSMRCALLSHRDGAKVCLGTGFTEQQYEXAENSLAFLCQQGFSLEHALYAMQAAGIYTLGCVLLDQELQVAKEERETPTTDSMPPLLRQALELKDHQGAEPAFLFGLELIICGLEKQLKCESGS

SEQ ID NO: 337 - protein, 208 aa, Artificial Sequence
  Sulfonylurea responsive repressor L7-3C03
MGSRLDKSKVINSALELLNEVGIEGLTTRKLAQKLGVEQPTLYWHVKNKRALLDALAIEMLDRHATHYCPLEGESWQDFLRNNAKSMRCALLSHRDGAKVCLGTGFTEQMYETAENSMAFLCQQGFSLENAMYAMQAAGIYTLGCVLLDQELQVAKEERETPTTDSMPPLVRQGLELKDHQGAEPAFLFGLELIICGLEKQLKCESGS

SEQ ID NO: 338 - protein, 208 aa, Artificial Sequence; identical to SEQ ID NO: 235
  Sulfonylurea responsive repressor L7-3E03

SEQ ID NO: 339 - protein, 208 aa, Artificial Sequence
  Sulfonylurea responsive repressor L7-3G03
MGSRLDKSKVINSALELLNEVGIEGLTTRKLAQKLGVEQPTLYWHVKNKRALLDALAIEMLDRHATHYCPLEGESWQDFLRNNAKSMRCALLSHRDGAKVCLGTGFTEKQYETAENSMAFLCQQGFSLEHAMYAMQAAGIYTLGCVLLDQELQVAKEERETPTTDSMPPLVRQALELKDHQGAEPAFLFGLELIICGLEKQLKCESGS

SEQ ID NO: 340 - protein, 208 aa, Artificial Sequence
  Sulfonylurea responsive repressor L7-3H03
MGSRLDKSKVINSALELLNEVGIEGLTTRKLAQKLGVEQPTLYWHVKNKRALLDAMAIEMLDRHATHLCPLEGESWQDFLRNNAKSMRCALLSHRDGAKVCLGTGFTEQMYETAENSLAFLCQQGFSLENALYAMQAAGIYTLGCVLLDQELQVAKEERETPTTDSMPPLVRQVLELKDHQGAEPAFLFGLELIICGLEKQLKCESGS

SEQ ID NO: 341 - protein, 208 aa, Artificial Sequence
  Sulfonylurea responsive repressor L7-3B04
  misc_feature (109)..(109): Xaa can be any naturally occurring amino acid
MGSRLDKSKVINSALELLNEVGIEGLTTRKLAQKLGVEQPTLYWHVKNKRALLDALAIEMLDRHATHYCPLEGESWQDFLRNNAKSMRCALLSHRDGAKVCLGTGFTEXQYEAAENSLAFLCQQGFSLEHALYAMQAVGIYTLGCVLLDQELQVAKEERETPTTDSMPPLVRQALELKDHQGAEPAFLFGLELIICGLEKQLKCESGS

SEQ ID NO: 342 - protein, 208 aa, Artificial Sequence
  Sulfonylurea responsive repressor L7-3E04
MGSRLDKSKVINSALELLNEVGIEGLTTRKLAQKLGVEQPTLYWHVKNKRALLDAMAIEMLDRHATHYCPLEGESWQDFLRNNAKSMRCALLSHRDGAKVCLGTGFTEQQYESAENSLAFLCQQGFSLEHAMYAMQAAGIFTLGCVLLDQELQVAKEERETPTTDSMPPLVRQALELKDHQGAEPAFLFGLELIICGLEKQLKCESGS

SEQ ID NO: 343 - protein, 208 aa, Artificial Sequence; identical to SEQ ID NO: 274
  Sulfonylurea responsive repressor L7-3G04

SEQ ID NO: 344 - protein, 208 aa, Artificial Sequence
  Sulfonylurea responsive repressor L7-3A05
MGSRLDKSKVINSALELLNEVGIEGLTTRKLAQKLGVEQPTLYWHVKNKRALLDALAIEMLDRHATHYCPLEGESWQDFLRNNAKSMRCALLSHRDGAKVCLGTGFTEQMYEAAENSLAFLCQQGFSLEHAMYAMQAVGIYTLGCVLLDQELQVAKEERETPTTDSMPPLVRQGLELKDHQGAEPAFLFGLELIICGLEKQLKCESGS

SEQ ID NO: 345 - protein, 208 aa, Artificial Sequence
  Sulfonylurea responsive repressorL7-3B05
  misc_feature (56)..(56): Xaa can be any naturally occurring amino acid
  misc_feature (68)..(68): Xaa can be any naturally occurring amino acid
  misc_feature (110)..(110): Xaa can be any naturally occurring amino acid
  misc_feature (130)..(130): Xaa can be any naturally occurring amino acid
  misc_feature (139)..(139): Xaa can be any naturally occurring amino acid
  misc_feature (141)..(141): Xaa can be any naturally occurring amino acid
MGSRLDKSKVINSALELLNEVGIEGLTTRKLAQKLGVEQPTLYWHVKNKRALLDAXAIEMLDRHATHXCPLEGESWQDFLRNNAKSMRCALLSHRDGAKVCLGTGFTEQXYETAENSLAFLCQQGFSLEXAMYAMQAAXIXTLGCVLLDQELQVAKEERETPTTDSMPPLVRQALELKDHQGAEPAFLFGLELIICGLEKQLKCESGS

SEQ ID NO: 346 - protein, 208 aa, Artificial Sequence
  Sulfonylurea responsive repressor L7-3H05
  misc_feature (171)..(171): Xaa can be any naturally occurring amino acid
MGSRLDKSKVINSALELLNEVGIEGLTTRKLAQKLGVEQPTLYWHVKNKRALLDAMAIEMLDRHATHYCPLEGESWQDFLRNNAKSMRCALLSHRDGAKVCLGTGFTEQQYESAENSLAFLCQQGFSLENAMYAMQAAGIYTLGCVLLDQELQVAKEERETPTTDSMPPLXRQALELKDHQGAEPAFLFGLELIICGLEKQLKCESGS

SEQ ID NO: 347 - protein, 208 aa, Artificial Sequence
  Sulfonylurea responsive repressor L7-3B06
MGSRLDKSKVINSALELLNEVGIEGLTTRKLAQKLGVEQPTLYWHVKNKRALLDAMAIEMLDRHATHICPLEGESWQDFLRNNAKSMRCALLSHRDGAKVCLGTGFTEQQYETAENSLAFLCQQGFSLEHAMYAMQAAGIYTLGCVLLDQELQVAKEERETPTTDSMPPLVRQVLELKDHQGAEPAFLFGLELIICGLEKQLKCESGS

SEQ ID NO: 348 - protein, 208 aa, Artificial Sequence
  Sulfonylurea responsive repressor L7-3D06
  misc_feature (130)..(130): Xaa can be any naturally occurring amino acid
MGSRLDKSKVINSALELLNEVGIEGLTTRKLAQKLGVEQPTLYWHVKNKRALLDAMAIEMLDRHATHMCPLEGESWQDFLRNNAKSMRCALLSHRDGAKVCLGTGFTEQQYESAENSMAFLCQQGFSLEXAMYAMQAVGIFTLGCVLLDQELQVAKEERETPTTDSMPPLVRQGLELKDHQGAEPAFLFGLELIICGLEKQLKCESGS

SEQ ID NO: 349 - protein, 208 aa, Artificial Sequence
  Sulfonylurea responsive repressor L7-3E06
MGSRLDKSKVINSALELLNEVGIEGLTTRKLAQKLGVEQPTLYWHVKNKRALLDALAIEMLDRHATHYCPLEGESWQDFLRNNAKSMRCALLSHRDGAKVCLGTGFTEKQYESAENSMAFLCQQGFSLEHALYAMQAVGIYTLGCVLLDQELQVAKEERETPTTDSMPPLVRQGLELKDHQGAEPAFLFGLELIICGLEKQLKCESGS

SEQ ID NO: 350 - protein, 208 aa, Artificial Sequence
  Sulfonylurea responsive repressor L7-3A07
MGSRLDKSKVINSALELLNEVGIEGLTTRKLAQKLGVEQPTLYWHVKNKRALLDAMAIEMLDRHATHYCPLEGESWQDFLRNNAKSMRCALLSHRDGAKVCLGTGFTEQQYEGAENSLAFLCQQGFSLEHAMYAMQAVGIFTLGCVLLDQELQVAKEERETPTTDSMPPLVRQGLELKDHQGAEPAFLFGLELIICGLEKQLKCESGS

SEQ ID NO: 351 - protein, 208 aa, Artificial Sequence
  Sulfonylurea responsive repressor L7-3C07
MGSRLDKSKVINSALELLNEVGIEGLTTRKLAQKLGVEQPTLYWHVKNKRALLDAMAIEMLDRHATHYCPLEGESWQDFLRNNAKSMRCALLSHRDGAKVCLGTGFTEQQYESAENSLAFLCQQGFSLENAMYAMQAVGIFTLGCVLLDQELQVAKEERETPTTDSMPPLLRQVLELKDHQGAEPAFLFGLELIICGLEKQLKCESGS

SEQ ID NO: 352 - protein, 208 aa, Artificial Sequence
  Sulfonylurea responsive repressor L7-3F07
MGSRLDKSKVINSALELLNEVGIEGLTTRKLAQKLGVEQPTLYWHVKNKRALLDAMAIEMLDRHATHICPLEGESWQDFLRNNAKSMRCALLSHRDGAKVCLGTGFTEQQYETAENSLAFLCQQGFSLENAMYAMQAVGIYTLGCVLLDQELQVAKEERETPTTDSMPPLVRQALELKDHQGAEPAFLFGLELIICGLEKQLKCESGS

SEQ ID NO: 353 - protein, 208 aa, Artificial Sequence
  Sulfonylurea responsive repressor L7-3A08
MGSRLDKSKVINSALELLNEVGIEGLTTRKLAQKLGVEQPTLYWHVKNKRALLDAMAIEMLDRHATHYCPLEGESWQDFLRNNAKSMRCALLSQRDGAKVCLGTGFTEQQYEAAENSLAFLCQQGFSLENAMYAMQAVGIFTLGCVLLDQELQVAKEERETPTTDSMPPLVRQALELKDHQGAEPAFLFGLELIICGLEKQLKCESGS

SEQ ID NO: 354 - protein, 208 aa, Artificial Sequence
  Sulfonylurea responsive repressor L7-3B08
MGSRLDKSKVINSALELLNEVGIEGLTTRKLAQKLGVEQPTLYWHVKNKRALLDAMAIEMLDRHATHYCPLEGESWQDFLRNNAKSMRCALLSHRDGAKVCLGTGFTEQQYEGAENSMAFLCQQGFSLENALYAMQAVGIYTLGCVLLDQELQVAKEERETPTTDSMPPLVRQVLELKDHQGAEPAFLFGLELIICGLEKQLKCESGS

SEQ ID NO: 355 - protein, 208 aa, Artificial Sequence
  Sulfonylurea responsive repressor L7-3C08
MGSRLDKSKVINSALELLNEVGIEGLTTRKLAQKLGVEQPTLYWHVKNKRALLDAMAIEMLDRHATHYCPLEGESWQDFLRNNAKSMRCALLSHRDGAKVCLGTGFTEQQYEGAENSMAFLCQQGFSLENAMYAMQAAGIYTLGCVLLDQELQVAKEERETPTTDSMPPLVRQALELKDHQGAEPAFLFGLELIICGLEKQLKCESGS

SEQ ID NO: 356 - protein, 208 aa, Artificial Sequence
  Sulfonylurea responsive repressor L7-3F08
  misc_feature (56)..(56): Xaa can be any naturally occurring amino acid
  misc_feature (110)..(110): Xaa can be any naturally occurring amino acid
  misc_feature (132)..(132): Xaa can be any naturally occurring amino acid
  misc_feature (138)..(138): Xaa can be any naturally occurring amino acid
MGSRLDKSKVINSALELLNEVGIEGLTTRKLAQKLGVEQPTLYWHVKNKRALLDAXAIEMLDRHATHYCPLEGESWQDFLRNNAKSMRCALLSHRDGAKVCLGTGFTEQXYEAAENSMAFLCQQGFSLEHAXYAMQAXGIYTLGCVLLDQELQVAKEERETPTTDSMPPLVRQVLELKDHQGAEPAFLFGLELIICGLEKQLKCESGS

SEQ ID NO: 357 - protein, 208 aa, Artificial Sequence
  Sulfonylurea responsive repressor L7-3G08
  misc_feature (53)..(53): Xaa can be any naturally occurring amino acid
  misc_feature (56)..(56): Xaa can be any naturally occurring amino acid
  misc_feature (63)..(63): Xaa can be any naturally occurring amino acid
  misc_feature (80)..(80): Xaa can be any naturally occurring amino acid
  misc_feature (86)..(86): Xaa can be any naturally occurring amino acid
  misc_feature (89)..(89): Xaa can be any naturally occurring amino acid
  misc_feature (99)..(99): Xaa can be any naturally occurring amino acid
  misc_feature (102)..(102): Xaa can be any naturally occurring amino acid
  misc_feature (106)..(106): Xaa can be any naturally occurring amino acid
  misc_feature (110)..(110): Xaa can be any naturally occurring amino acid
  misc_feature (121)..(121): Xaa can be any naturally occurring amino acid
  misc_feature (130)..(130): Xaa can be any naturally occurring amino acid
  misc_feature (132)..(132): Xaa can be any naturally occurring amino acid
  misc_feature (140)..(141): Xaa can be any naturally occurring amino acid
  misc_feature (148)..(148): Xaa can be any naturally occurring amino acid
  misc_feature (171)..(171): Xaa can be any naturally occurring amino acid
  misc_feature (174)..(174): Xaa can be any naturally occurring amino acid
  misc_feature (198)..(198): Xaa can be any naturally occurring amino acid
MGSRLDKSKVINSALELLNEVGIEGLTTRKLAQKLGVEQPTLYWHVKNKRALXDAXAIEMLDXHATHYCPLEGESWQDFXRNNAKXMRXALLSHRDGAXVCXGTGXTEQXYETAENSLAFXCQQGFSLEXAXYAMQAVGXXTLGCVLXDQELQVAKEERETPTTDSMPPLXRQXLELKDHQGAEPAFLFGLELIICGXEKQLKCESGS

SEQ ID NO: 358 - protein, 208 aa, Artificial Sequence; identical to SEQ ID NO: 344
  Sulfonylurea responsive repressor L7-3B09

SEQ ID NO: 359 - protein, 208 aa, Artificial Sequence
  Sulfonylurea responsive repressor L7-3F09
MGSRLDKSKVINSALELLNEVGIEGLTTRKLAQKLGVEQPTLYWHVKNKRALLDAMAIEMLDRHATHYCPLEGESWQDFLRNNAKSMRCALLSHRDGAKVCLGTGFTEQQYEAAENSMAFLCQQGFSLEHALYAMQAACIYTLGCVLLDQELQVAKEERETPTTDSMPPLVRQALELKDHQGAEPAFLFGLELIICGLEKQLKCESGS

SEQ ID NO: 360 - protein, 208 aa, Artificial Sequence; identical to SEQ ID NO: 309
  Sulfonylurea responsive repressor L7-3A10

SEQ ID NO: 361 - protein, 208 aa, Artificial Sequence
  Sulfonylurea responsive repressor L7-3B10
MGSRLDKSKVINSALELLNEVGIEGLTTRKLAQKLGVEQPTLYWHVKNKRALLDAMAIEMLDRHATHYCPLEGESWQDFLRNNAKSMRCALLSHRDGAKVCLGTGFTEQHYESAENSLAFLCQQGFSLEHAMYAMQAVGIYTLGCVLLDQELQVAKEERETPTTDSMPPLVRQALELKDHQGAEPAFLFGLELIICGLEKQLKCESGS

SEQ ID NO: 362 - protein, 208 aa, Artificial Sequence
  Sulfonylurea responsive repressor L7-3C10
  misc_feature (138)..(138): Xaa can be any naturally occurring amino acid
MGSRLDKSKVINSALELLNEVGIEGLTTRKLAQKLGVEQPTLYWHVKNKRALLDAMAIEMLDRHATHYCPLEGESWQDFLRNNAKSMRCALLSHRDGAKVCLGTGFTEQQYEAAENSMAFLCQQGFSLEHAMYAMQAXGIYTLGCVLLDQELQVAKEERETPTTDSMPPLVRQALELKDHQGAEPAFLFGLELIICGLEKQLKCESGS

SEQ ID NO: 363 - protein, 208 aa, Artificial Sequence
  Sulfonylurea responsive repressor L7-3G10
MGSRLDKSKVINSALELLNEVGIEGLTTRKLAQKLGVEQPTLYWHVKNKRALLDAMAIEMLDRHATHYCPLEGESWQDFLRNNAKSMRCALLSHRDGAKVCLGTGFTEQQYETAENSMAFLCQQGFSLEHAMYAMQAAGIYTLGCVLLDQELQVAKEERETPTTDSMPPLLRQALELKDHQGAEPAFLFGLELIICGLEKQLKCESGS

SEQ ID NO: 364 - protein, 208 aa, Artificial Sequence
  Sulfonylurea responsive repressor L7-3A11
MGSRLDKSKVINSALELLNEVGIEGLTTRKLAQKLGVEQPTLYWHVKNKRALLDAMAIEMLDRHATHFCPLEGESWQDFLRNNAKSMRCALLSHRDGAKVCLGTGFTEQQYETAENSLAFLCQQGFSLENALYAMQAACIYTLGCVLLDQELQVAKEERETPTTDSMPPLVRQALELKDHQGAEPAFLFGLELIICGLEKQLKCESGS

SEQ ID NO: 365 - protein, 208 aa, Artificial Sequence
  Sulfonylurea responsive repressor L7-3C11
MGSRLDKSKVINSALELLNEVGIEGLTTRKLAQKLGVEQPTLYWHVKNKRALLDAMAIEMLDRHATHYCPLEGESWQDFLRNNAKSMRCALLSHRDGAKVCLGTGFTEQQYESAENSMAFLCQQGFSLENAMYAMQAAGIYTLGCVLLDQELQVAKEERETPTTDSMPPLVRQGLELKDHQGAEPAFLFGLELIICGLEKQLKCESGS

SEQ ID NO: 366 - protein, 208 aa, Artificial Sequence
  Sulfonylurea responsive repressor L7-3E11
MGSRLDKSKVINSALELLNEVGIEGLTTRKLAQKLGVEQPTLYWHVKNKRALLDAMAIEMLDRHATHMCPLEGESWQDFLRNNAKSMRCALLSHRDGAKVCLGTGFTEQQYESAENSMAFLCQQGFSLEHAMYAMQAAGIYTLGCVLLDQELQVAKEERETPTTDSMPPLLRQALELKDHQGAEPAFLFGLELIICGLEKQLKCESGS

SEQ ID NO: 367 - protein, 208 aa, Artificial Sequence
  Sulfonylurea responsive repressor L7-3G11
  misc_feature (68)..(68): Xaa can be any naturally occurring amino acid
  misc_feature (113)..(113): Xaa can be any naturally occurring amino acid
  misc_feature (171)..(171): Xaa can be any naturally occurring amino acid
  misc_feature (174)..(174): Xaa can be any naturally occurring amino acid
MGSRLDKSKVINSALELLNEVGIEGLTTRKLAQKLGVEQPTLYWHVKNKRALLDAMAIEMLDRHATHXCPLEGESWQDFLRNNAKSMRCALLSHRDGAKVCLGTGFTEQQYEXAENSMAFLCQQGFSLENAMYAMQAVGIYTLGCVLLDQELQVAKEERETPTTDSMPPLXRQXLELKDHQGAEPAFLFGLELIICGLEKQLKCESGS

SEQ ID NO: 368 - protein, 208 aa, Artificial Sequence
  Sulfonylurea responsive repressor L7-3A12
MGSRLDKSKVINSALELLNEVGIEGLTTRKLAQKLGVEQPTLYWHVKNKRALLDALAIEMLDRHATHYCPLEGESWQDFLRNNAKSMRCALLSHRDGAKVCLGTGFTEQHYEAAENSMAFLCQQGFSLENAMYAMQAVGIFTLGCVLLDQELQVAKEERETPTTDSMPPLVRQALELKDHQGAEPAFLFGLELIICGLEKQLKCESGS

SEQ ID NO: 369 - protein, 208 aa, Artificial Sequence
  Sulfonylurea responsive repressor L7-3B12
MGSRLDKSKVINSALELLNEVGIEGLTTRKLAQKLGVEQPTLYWHVKNKRALLDALAIEMLDRHATHYCPLEGESWQDFLRNNAKSMRCALLSHRDGAKVCLGTGFTEQMYESAENSMAFLCQQGFSLEHAMYAMQAAGIYTLGCVLLDQELQVAKEERETPTTDSMPPLLRQALELKDHQGAEPAFLFGLELIICGLEKQLKCESGS

SEQ ID NO: 370 - protein, 208 aa, Artificial Sequence
  Sulfonylurea responsive repressor L7-3C12
  misc_feature (110)..(110): Xaa can be any naturally occurring amino acid
  misc_feature (113)..(113): Xaa can be any naturally occurring amino acid
  misc_feature (141)..(141): Xaa can be any naturally occurring amino acid
  misc_feature (171)..(171): Xaa can be any naturally occurring amino acid
MGSRLDKSKVINSALELLNEVGIEGLTTRKLAQKLGVEQPTLYWHVKNKRALLDAMAIEMLDRHATHYCPLEGESWQDFLRNNAKSMRCALLSHRDGAKVCLGTGFTEQXYEXAENSLAFLCQQGFSLEHALYAMQAACIXTLGCVLLDQELQVAKEERETPTTDSMPPLXRQGLELKDHQGAEPAFLFGLELIICGLEKQLKCESGS

SEQ ID NO: 371 - protein, 208 aa, Artificial Sequence
  Sulfonylurea responsive repressor L7-3E12
MGSRLDKSKVINSALELLNEVGIEGLTTRKLAQKLGVEQPTLYWHVKNKRALLDAMAIEMLDRHATHYCPLEGESWQDFLRNNAKSMRCALLSHRDGAKVCLGTGFTEQQYESAENSMAFLCQQGFSLEHAMYAMQAVGIYTLGCVLLDQELQVAKEERETPTTDSMPPLLRQALELKDHQGAEPAFLFGLELIICGLEKQLKCESGS

SEQ ID NO: 372 - protein, 208 aa, Artificial Sequence
  Sulfonylurea responsive repressor L7-3F12
MGSRLDKSKVINSALELLNEVGIEGLTTRKLAQKLGVEQPTLYWHVKNKRALLDAMAIEMLDRHATHVCPLEGESWQDFLRNNAKSMRCALLSHRDGAKVCLGTGFTEQHYESAENSLAFLCQQGFSLEHALYAMQAVGIYTLGCVLLDQELQVAKEERETPTTDSMPPLVRQALELKDHQGAEPAFLFGLELIICGLEKQLKCESGS

SEQ ID NO: 373 - protein, 208 aa, Artificial Sequence
  Sulfonylurea responsive repressor L7-3G12
MGSRLDKSKVINSALELLNEVGIEGLTTRKLAQKLGVEQPTLYWHVKNKRALLDAMAIEMLDRHATHFCPLEGESWQDFLRNNAKSMRCALLSHRDGAKVCLGTGFTEQQYETAENSLAFLCQQGFSLENAMYAMQAVGIYTLGCVLLDQELQVAKEERETPTTDSMPPLVRQGLELKDHQGAEPAFLFGLELIICGLEKQLKCESGS

SEQ ID NO: 374 - protein, 208 aa, Artificial Sequence
  Sulfonylurea responsive repressor L7-4A01
MGSRLDKSKVINSALELLNEVGIEGLTTRKLAQKLGVEQPTLYWHVKNKRALLDAMAIEMLDRHATHYCPLEGESWQDFLRNNAKSMRCALLSHRDGAKVCLGTGFTEQQYETAENSLAFLCQQGFSLENALYAMQAACIYTLGCVLLDQELQVAKEERETPTTDSMPPLVRQVLELKDHQGAEPAFLFGLELIICGLEKQLKCESGS

SEQ ID NO: 375 - protein, 208 aa, Artificial Sequence
  Sulfonylurea responsive repressor L7-4A03
  misc_feature (8)..(10): Xaa can be any naturally occurring amino acid
MGSRLDKXXXINSALELLNEVGIEGLTTRKLAQKLGVEQPTLYWHVKNKRALLDAMAIEMLDRHATHYCPLEGESWQDFLRNNAKSMRCALLSHRDGAKVCLGTGFTEQQYDTAENSLAFLCQQGFSLENALYAMQAVGIYTLGCVLLDQELQVAKEERETPTTDSMPPLVRQVLELKDHQGAEPVFLFGLELIICGLEKQLKCESGS

SEQ ID NO: 376 - protein, 208 aa, Artificial Sequence
  Sulfonylurea responsive repressor L7-4A04
MGSRLDKSKVINSALELLNEVGIEGLTTRKLAQKLGVEQPTLYWHVKNKRALLDALAIEMLDRHATHYCPLEGESWQDFLRNNALSMRCALLSHRDGAKVCLGTGFTEKQYETAENSMAFLCQQGFSLEHAMYAMQAAGIYTLGCVLLDQELQVAKEERETPTTDSMPPLVRQALELKDHQGAEPAFLFGLELIICGLEKQLKCESGS

SEQ ID NO: 377 - protein, 208 aa, Artificial Sequence
  Sulfonylurea responsive repressor L7-4A06
MGSRLDKSKVINSALELLNEVGIEGLTTRKLAQKLGVEQPTLYWHVKNKRALLDAMAIEMLDRHATHYCPLEGESWQDFLRNNAKSMRCALLSHRDGAKVCLGTGFTEQQYETAENSLAFLCQQGFSLENAMYAMQAVGIYTLGCVLLDQELQVAKEERETPTTDSMPPLLRQVLELKDHQGAEPAFLFGLELIICGLEKQLKCESGS

SEQ ID NO: 378 - protein, 208 aa, Artificial Sequence
  Sulfonylurea responsive repressor L7-4A08
  misc_feature (7)..(9): Xaa can be any naturally occurring amino acid
MGSRLDXXXVINSALELLNEVGIEGLTTRKLAQKLGVEQPTLYWHVKNKRALLDAMAIEMLDRHATHYCPLEGESWQDFLRNNAKSMRCALLSHRDGAKVCLGTGFTEQQYEAAENSMAFLCQQGFSLEHAMYAMQAACIYTLGCVLLDQELQVAKEERETPTTDSMPPLVRQALELKDHQGAEPAFLFGLELIICGLEKQLKCESGS

SEQ ID NO: 379 - protein, 208 aa, Artificial Sequence
  Sulfonylurea responsive repressor L7-4A09
  misc_feature (56)..(56): Xaa can be any naturally occurring amino acid
  misc_feature (110)..(110): Xaa can be any naturally occurring amino acid
  misc_feature (171)..(171): Xaa can be any naturally occurring amino acid
MGSRLDKSKVINSALELLNEVGIEGLTTRKLAQKLGVEQPTLYWHVKNKRALLDAXAIEMLDRHATHYCPLEGESWQDFLRNNAKSMRCALLSHRDGAKVCLGTGFTEQXYEIAENSLAFLCQQGFSLEHAMYAMQAAGIYTLGCVLLDQELQVAKEERETPTTDSMPPLXRQALELKDHQGAEPAFLFGLELIICGLEKQLKCESGS

SEQ ID NO: 380 - protein, 208 aa, Artificial Sequence
  Sulfonylurea responsive repressor L7-4A12
MGSRLDKSKVINSALELLNEVGIEGLTTRKLAQKLGVEQPTLYWHVKNKRALLDALAIEMLDRHATHYCPLEGESWQDFLRNNAKSMRCALLSHRDGAKVCLGTGFTEKQYEAAENSLAFLCQQGFSLEHALYAMQAVGIYTLGCVLLDQELQVAKEERETPTTDSMPPLVRQVLELKDHQGAEPAFLFGLELIICGLEKQLKCESGS

SEQ ID NO: 381 - protein, 208 aa, Artificial Sequence
  Sulfonylurea responsive repressor L7-4B03
  misc_feature (8)..(10): Xaa can be any naturally occurring amino acid
  misc_feature (19)..(19): Xaa can be any naturally occurring amino acid
MGSRLDKXXXINSALELLXEVGIEGLTTRKLAQKLGVEQPTLYWHVKNKRALLDAMAIEMLDRHATHYCPLEGESWQDFLRNNAKSMRCALLSHRDGAKVCLGTGFTEKLYESAENSLAFLCQQGFSLENAMYAMQAVCIFTLGCVLLDQELQVAKEERETPTTDSMPPLLRQGLELKDHQGAEPAFLFGLELIICGLEKQLKCESGS

SEQ ID NO: 382 - protein, 208 aa, Artificial Sequence
  Sulfonylurea responsive repressor L7-4B04
MGSRLDKSKVINSALELLNEVGIEGLTTRKLAQKLGVEQPTLYWHVKNKRALLDAMAIEMLDRHATHYCPLEGESWQDFLRNNAKSMRCALLSHRDGAKVCLGTGFTEQQYESAENSLAFLCQQGFSLEHAMYAMQAVGIFTLGCVLLDQELQVAKEERETPTTDSMPPLLRQALELKDHQGAEPAFLFGLELIICGLEKQLKCESGS

SEQ ID NO: 383 - protein, 208 aa, Artificial Sequence
  Sulfonylurea responsive repressor L7-4B06
MGSRLDKSKVINSALELLNEVGIEGLTTRKLAQKLGVEQPTLYWHVKNKRALLDALAIEMLDRHATHYCPLEGESWQDFLRNNAKSMRCALLSHRDGAKVCLGTGFTEQMYEGAENSMAFLCQQGFSLEHAMYAMQAAGIYTLGCVLLDQELQVAKEERETPTTDSMPPLVRQALELKDHQGAEPAFLFGLELIICGLEKQLKCESGS

SEQ ID NO: 384 - protein, 208 aa, Artificial sequence
  Sulfonylurea responsive repressor  L7-4B07
  misc_feature (9)..(10): Xaa can be any naturally occurring amino acid
  misc_feature (139)..(139): Xaa can be any naturally occurring amino acid
MGSRLDKSXXINSALELLNEVGIEGLTTRKLAQKLGVEQPTLYWHVKNKRALLDAMAIEMLDRHATHYCPLEGESWQDFLRNNAKSMRCALLSHRDGAKVCLGSGFTEQQYETAENSMAFLCQQGFSLENAMYAMQAAXIFTLGCVLLDQELQVAKEERETPTTDSMPPLVRQVLELKDHQGAEPAFLFGLELIICGLEKQLKCESGS

SEQ ID NO: 385 - protein, 208 aa, Artificial sequence
  Sulfonylurea responsive repressor L7-4C01
  misc_feature (18)..(19): Xaa can be any naturally occurring amino acid
  misc_feature (21)..(21): Xaa can be any naturally occurring amino acid
MGSRLDKSKVINSALELXXEXGIEGLTTRKLAQKLGVEQPTLYWHVKNKRALLDAMAIEMLDRHATHICPLEEESWQDFLRNNAKSMRCALLSHRDGAKVCLGTGFTEQQYETAENSMAFLCQQGFSLEHAMYAMQAACIYTLGCVLLDQELQVAKEERETPTTDSMPPLVRQVLELKDHQGAEPAFLFGLELIICGLEKQLKCESGS

SEQ ID NO: 386 - protein, 208 aa, Artificial sequence
  Sulfonylurea responsive repressor L7-4C03
  misc_feature (8)..(10): Xaa can be any naturally occurring amino acid
MGSRLDKXXXINSALELLNEVGIEGLTTRKLAQKLGVEQPTLYWHVKNKRALLDAMAIEMLDRHATHVCPLEGESWQDFLRNNAKSMRCALLSHRDGAKVCLGTGFTEQQYESAENSLAFLCQQGFSLEHAMYAMQAAGIFTLGCVLLDQELQVAKEERETPTTDSMPPLVRQALELKDHQGAEPAFLFGLELIICGLEKQLKCESGS

SEQ ID NO: 387 - protein, 208 aa, Artificial sequence
  Sulfonylurea responsive repressor L7-4C04
  misc_feature (6)..(7): Xaa can be any naturally occurring amino acid
MGSRLXXSKVINSALELLNEVGIEGLTTRKLAQKLGVEQPTLYWHVKNKRALLDAMAIEMLDRHATHMCPLEGESWQDFLRNNAKSMRCALLSHRDGAKVCLGTGFTEQHYETAENSMAFLCQQGFSLENAMYAMQAAGIYTLGCVLLDQELQVAKEERETPTTDSMPPLVRQVLELKDHQGAEPAFLFGLELIICGLEKQLKCESGS

SEQ ID NO: 388 - protein, 208 aa, Artificial sequence
  Sulfonylurea responsive repressor L7-4C06
  misc_feature (9)..(9): Xaa can be any naturally occurring amino acid
  misc_feature (19)..(19): Xaa can be any naturally occurring amino acid
MGSRLDKSXVINSALELLXEVGIEGLTTRKLAQKLGVEQPTLYWHVKNKRALLDAMAIEMLDRHATHYCPLEGESWQDFLRNNAKSMRCALLSHRDGAKVCLGTGFTEQQYEAAENSLAFLCQQGFSLENALYAMQAVGIFTLGCVLLDQELQVAKEERETPTTDSMPPLVRQGLELKDHQGAEPAFLFGLELIICGLEKQLKCESGS

SEQ ID NO: 389 - protein, 208 aa, Artificial equence
  Sulfonylurea responsive repressor L7-4C09
MGSRLDKSKVINSALELLNEVGIEGLTTRKLAQKLGVEQPTLYWHVKNKRALLDAMAIEMLDRHATHYCPLEGESWQDFLRNNAKSMRCALLSHRDGAKVCLGTGFTEQQYESAENSLAFLCQQGFSLENAMYAMQAAGIFTLGCVLLDQELQVAKEERETPTTDSMPPLVRQALELKDHQGAEPAFLFGLELIICGLEKQLKCESGS

SEQ ID NO: 390 - protein, 208 aa, Artificial sequence
  Sulfonylurea responsive repressor L7-4C12
MGSRLDKSKVINSALELLNEVGIEGLTTRKLAQKLGVEQPTLYWHVKNKRALLDAMAIEMLDRHATHFCPLEGESWQDFLRNNAKSMRCALLSHRDGAKVCLGTGFTEQHYESAENSLAFLCQQGFSLENAMYAMQAVGIYTLGCVLLDQELQVAKEERETPTTDSMPPLVRQVLELKDHQGAEPAFLFGLELIICGLEKQLKCESGS

SEQ ID NO: 391 - protein, 208 aa, Artificial sequence
  Sulfonylurea responsive repressor L7-4D04
  misc_feature (6)..(6): Xaa can be any naturally occurring amino acid
MGSRLXKSKVINSALELLNEVGIEGLTTRKLAQKLGVEQPTLYWHVKNKRALLDAMAIEMLDRHATHVCPLEGESWQDFLRNNAKSMRCALLSHRDGAKVCLGTGFTEQQYETAENSLAFLCQQGFSLEHALYAMQAVGIYTLGCVLLDQELQVAKEERETPTTDSMPPLVRQVLELKDHQGAEPAFLFGLELIICGLEKQLKCESGS

SEQ ID NO: 392 - protein, 208 aa, Artificial sequence
  Sulfonylurea responsive repressor L7-4D07
  misc_feature (5)..(7): Xaa can be any naturally occurring amino acid
  misc_feature (9)..(9): Xaa can be any naturally occurring amino acid
MGSRXXXSXVINSALELLNEVGIEGLTTRKLAQKLGVEQPTLYWHVKNKRALLDALAIEMLDRHATHYCPLEGESWQDFLRNNAKSMRCALLSHRDGAKVCLGTGFTEKQYEAAENSMAFLCQQGFSLEHALYAMQAVGIYTLGCVLLDQELQVAKEERETPTTDSMPPLVRQALELKDHQGAEPAFLFGLELIICGLEKQLKCESGS

SEQ ID NO: 393 - protein, 209 aa, Artificial sequence
  Sulfonylurea responsive repressor L7-4D08
  misc_feature (6)..(10): Xaa can be any naturally occurring amino acid
  misc_feature (209)..(209): Xaa can be any naturally occurring amino acid
MGSRLXXXXXINSALELLNEVGIEGLTTRKLAQKLGVEQPTLYWHVKNKRALLDAMAIEMLDRHATHYCPLEGESWQDFLRNNAKSMRCALLSHRDGAKVCLGTGFTEQQYESAENSMAFLCQQGFSLENAMYAMQAAGIFTLGCVLLDQELQVAKEERETPTTDSMPPLLRQVLELKDHQGAEPAFLFGLELIICGLEKQLKCESGSX

SEQ ID NO: 394 - protein, 208 aa, Artificial sequence
  Sulfonylurea responsive repressor L7-4D10
  misc_feature (7)..(7): Xaa can be any naturally occurring amino acid
  misc_feature (9)..(10): Xaa can be any naturally occurring amino acid
  misc_feature (19)..(19): Xaa can be any naturally occurring amino acid
MGSRLDXSXXINSALELLXEVGIEGLTTRKLAQKLGVEQPTLYWHVKNKRALLDAMAIEMLDRHATHFCPLEGESWQDFLRNNAKSMRCALLSHRDGAKVCLGTGFTEQQYEAAENSMAFLCQQGFSLENAMYAMQAVGIFTLGCVLLDQELQVAKEERETPTTDSMPPLVRQVLELKDHQGAEPAFLFGLELIICGLEKQLKCESGS

SEQ ID NO: 395 - protein, 208 aa, Artificial  sequence
  Sulfonylurea responsive repressor L7-4D11
  misc_feature (6)..(7): Xaa can be any naturally occurring amino acid
MGSRLXXSKVINSALELLNEVGIEGLTTRKLAQKLGVEQPTLYWHVKNKRALLDAMAIEMLDRHATHYCPLEGESWQDFLRNNAKSMRCALLSHRDGAKVCLGTGFTEQQYETAENSMAFLCQQGFSLEHAMYAMQAVGIYTLGCVLLDQELQVAKEERETPTTDSMPPLLRQVLELKDHQGAEPAFLFGLELIICGLEKQLKCESGS

SEQ ID NO: 396 - protein, 208 aa, Artificial sequence
  Sulfonylurea responsive repressor L7-4E01
MGSRLDKSKVINSALELLNEVGIEGLTTRKLAQKLGVEQPTLYWHVKNKRALLDAMAMEMLDRHATHYCPLEGESWQDFLRNNAKSMRCALLSHRDGAKVCLGTGFTEQQYESAENSMAFLCQQGFSLENALYAMQAVGIYTLGCVLLDQELQVAKEERETPTTDSMPPLVRQGLELKDHQGAEPAFLFGLELIICGLEKQLKCESGS

SEQ ID NO: 397 - protein, 208 aa, Artificial sequence
  Sulfonylurea responsive repressor L7-4E02
  misc_feature (179)..(179): Xaa can be any naturally occurring amino acid
MGSRLDKSKVINSALELLNEVGIEGLTTRKLAQKLGVEQPTLYWHVKNKRALLDALAIEMLDRHATHYCPLEGESWQDFLRNNAKSMRCALLSHRDGAKVCLGTGFTEQQYEAAENSLAFLCQQGFSLEHALYAMQAAGIYTLGCVLLDQELQVAKEERETPTTDSMPPLLRQGLELKXHQGAEPAFLFGLELIICGLEKQLKCESGS

SEQ ID NO: 398 - protein, 208 aa, Artificial sequence
  Sulfonylurea responsive repressor L7-4E04
  misc_feature (5)..(9): Xaa can be any naturally occurring amino acid
MGSRXXXXXVINSALELLNEVGIEGLTTRKLAQKLGVEQPTLYWHVKNKRALLDAMAIEMLDRHATHYCPLEGESWQDFLRNNAKSMRCALLSHRDGAKVCLGTGFTEQQYETAENSLAFLCQQGFSLENAMYAMQAAGIYTLGCVLLDQELQVAKEERETPTTDSMPPLLRQVLELKDHQGAEPAFLFGLELIICGLEKQLKCESGS

SEQ ID NO: 399 - protein, 208 aa, Artificial sequence; identical to SEQ ID NO: 301
  Sulfonylurea responsive repressor L7-4E05

SEQ ID NO: 400 - protein, 208 aa, Artificial sequence
  Sulfonylurea responsive repressor L7-4E07
MGSRLDKSKVINSALELLNEVGIEGLTTRKLAQKLGVEQPTLYWHVKNKRALLDAMAIEMLDRHATHYCPLEGESWQDFLRNNAKSMRCALLSHRDGAKVCLGTGFTEQQYETAENSMAFLCQQGFSLENALYAMQAAGIFTLGCVLLDQELQVAKEERETPTTDSMPPLVRQVLELKDHQGAEPAFLFGLELIICGLEKQLKCESGS

SEQ ID NO: 401 - protein, 208 aa, Artificial sequence
  Sulfonylurea responsive repressor L7-4E08
MGSRLDKSKVINSALELLNEVGIEGLTTRKLAQKLGVEQPTLYWHVKNKRALLDAMAIEMLDRHATHICPLEGESWQDFLRNNAKSMRCALLSHRDGAKVCLGTGFTEQQYETAENSMAFLCQQGFSLENAMYAMQAVCIYTLGCVLLDQELQVAKEERETPTTDSMPPLVRQALELKDHQGAEPAFLFGLELIICGLEKQLKCESGS

SEQ ID NO: 402 - protein, 208 aa, Artificial sequence
  Sulfonylurea responsive repressor L6-3A09
MGSRLDKSKVINSALELLNEVGIEGLTTRKLAQKLGVEQPTLYWHVKNKRALLDALAIEMMDRHQTHLCPLEGESWQDFLRNNAKSMRCALLSHRDGAKVCLGTRWTEQMYEAAENMLAFLCQQGFSLENALYAVSAVRVFTLGCVLFDQESQVAKEERETPTTASMPPLVRQAWELKDHQGAEPAFLFGLELIICGLEKQLKCESGS

SEQ ID NO: 403 - protein, 208 aa, Artificial sequence
  Sulfonylurea responsive repressor L7-4C06(E03)
  misc_feature (9)..(9): Xaa can be any naturally occurring amino acid
MGSRLDKSXVINSALELLNEVGIEGLTTRKLAQKLGVEQPTLYWHVKNKRALLDAMAIEMLDRHATHYCPLEGESWQDFLRNNAKSMRCALLSHRDGAKVCLGTGFTEQQYEAAENSLAFLCQQGFSLENALYAMQAVGIFTLGCVLLDQELQVAKEERETPTTDSMPPLVRQGLELKDHQGAEPAFLFGLELIICGLEKQLKCESGS

SEQ ID NO: 404 - protein, 207 aa, Artificial sequence
  Sulfonylurea responsive repressor L10-84(B12)
MARLDKSKVINSALELLNEVGIEGLTTRKLAQKLGVEQPTLYWHVKNKRALLDAMAIEMLDRHAPHLSLLEGESWQDFLRNNAKSMRNALLSHRDGAKVCLGTGFTEQNYETAENSLAFLTQQGFSLENALYAWQALGIYTLGCALLDQELQVAKEERETPTTDSMPPLVRQALELKDHQGAEPAFLFGLELIIAGLEKQLKAESGS

SEQ ID NO: 405 - protein, 207 aa, Artificial sequence
  Sulfonylurea responsive repressor L13-2-46(B10)
MARLDKSKVINSALELLNEVGIEGLTTRKLAQKLGVEQPTLYWHVKNKRALLDAMAIEMFDRHKTHYCPLEGESWQDFLRNRAKSMRNALLSHRDGAKVALGTGFTEQQYETMENCLAFLTQQGFSLENALYAMQAVGIYTLGCVLLDQELQVAKEERETPTTDSMPPLVRQAYELRDHQGAEPAFLFGLELIISGLEKQLKAESGS

SEQ ID NO: 406 - protein, 207 aa, Artificial sequence
  Sulfonylurea responsive repressor L12-1-10
MARLDKSKVINSALELLNEVGIEGLTTRKLAQKLGVEQPTLYWHVKNKRALLDAMAFEMLDRHAIHFLPLEGASWQNFLRNTAKSMRNALLSHRDGAKVCLGTGFTERQYETAENRLAFLTQQGFSLEQALYAWQAVGIYTLGCVLLDQELQVAKEERETPTTDSMPPLVRQAWELKDHQGAEPAFLFGLELIISGLEKQLKAESGS

SEQ ID NO: 407 - protein, 207 aa, Artificial sequence
  Sulfonylurea responsive repressor L13-2-23
MARLDKSKVINSALELLNEVGIEGLTTRKLAQKLGVEQPTLYWHVKNKRALLDAMAIEMLDRHAIHLLPLEGESWQDFLRNNAKSMRCALLSHRDGAKVCLGTGFTEQQYETAENRLAFLTQQGFSLENALYAWQAVGIYTLGCVLLDQELQVAKEERETPTTDSMPPLVRQALELKDHQGAEPAFLFGLELIIGGLEKQLKSESGS

SEQ ID NO: 408 - protein, 207 aa, Artificial sequence
  Sulfonylurea responsive repressor L7-1C3-A5
MARLDKSKVINSALELLNEVGIEGLTTRKLAQKLGVEQPTLYWHVKNKRALLDAMAIEMLDRHATHVCPLEGESWQDFLRNNAKIMRCALLSHRDGAKVCLGTGFTEQQYETAENSLAFLCQQGFSLEHALYAMQAAGIFTLGCVLLDQELQVAKEERETPTTDSMPPLVRQALELNDHQGAEPAFLFGLELIICGLEKQLKCESGS

SEQ ID NO: 409 - protein, 207 aa, Artificial sequence
  Sulfonylurea responsive repressor L7-1F8-A11
MARLDKSKVINSALELLNEVGIEGLTTRKLAQKLGVEQPTLYWHVKNKRALLDAMAIEMLDRHATHYCPLEGESWQDFLRNNAKSMRCALLSHRDGAKVCLGTGFTEQQYETAENSLAFLCQQGFSLENALYAMQAVGIYTLGCVLLDQELQVAKEERETPTTDSMPPLVRQALELKDHQGAEPAFLFGLELIICGLEKQLKCESGS

SEQ ID NO: 410 - protein, 207 aa, Artificial sequence
  Sulfonylurea responsive repressor L7-1G6-B2
MARLDKSKVINSALELLNEVGIEGLTTRKLAQKLGVEQPTLYWHVKNKRALLDAMAIEMLDRHATHYCPLEGESWQDFLRNNAKSMRCALLSHRDGAKVCLGTGFTEQQYETAENSMAFLCQQGFSLENALYAMQAVGIYTLGCVLLDQELQVAKEERETPTTDSMPPLVRQALELKDHQGAEPAFLFGLELIICGLEKQLKCESGS

SEQ ID NO: 411 - protein, 207 aa, Artificial sequence
  Sulfonylurea responsive repressor L7-3E3-D1
MARLDKSKVINSALELLNEVGIEGLTTRKLAQKLGVEQPTLYWHVKNKRALLDAMAIEMLDRHATHYCPLEGESWQDFLRNNAKSMRCALLSHRDGAKVCLGTGFTEQQYETAENSLAFLCQQGFSLEHAMYAMQAAGIYTLGCVLLDQELQVAKEERETPTTDSMPPLVRQALELKDHQGAEPAFLFGLELIICGLEKQLKCESGS

SEQ ID NO: 412 - protein, 208 aa, Artificial Sequence
  rSuR L1-18
MGSRLDKSKVINSALELLNEVGIEGLTTRKLAQKLGVEQPTLYWHVKNKRALLDALAIEMLDRHLTHFCPLEGESWQDFLRNNAKSMRCALLSHRDGAKVWLGTGFTEKQYETKENRLAFLCQQGFSLENALYAIRAVSRFTLGCVLQDQEPQVAKEERETPTTDSMPPLLRQAVELFDHQGAEPAFLFGLELIICGLEKQLKCESES

SEQ ID NO: 413 - protein, 208 aa, Artificial sequence
  rSuR L1-21
MGSRLDKSKVINSALELLNEVGIEGLTTRKLAQKLGVEQPTLYWHVKNKRALLDALAIEMLDRHATHFCPLEGESWQDFLRNNAKSFRCALLSHRDGAKVCLGTAGTEKQYETLENCLAFLCQQGFSLENALYARSAVVCFTLGCVLFDQEMQVAKEERETPTTDSMPPLLRQAAELLDHQGAEPAFLFGLELIICGLEKQLKCESGS

SEQ ID NO: 414 - protein, 208 aa, Artificial sequence
  rSuR L1-25
MGSRLDKSKVINSALELLNEVGIEGLTTRKLAQKLGVEQPTLYWHVKNKRALLDALAIEMLDRHATHFCPLEGESWQDFLRNTAKSMRCALLSHRDGAKVLLGTATTEKQYETLENLLAFLYQQGFSLENALYAWQAVWRFTLGCVLIDQETQVAKEERETPTTDSMPPLLRQAVELKDHQGAEPAFLFGLELIICGLEKQLKCETGS

SEQ ID NO: 415 - protein, 208 aa, Artificial sequence
  rSuR L1-33
MGSRLDKSKVINSALELLNEVGIEGLTTRKLAQKLGVEQPTLYWHVKNKRALLDALAIEMLDRHATHFCPLEGESWQDFLRNNAKSMRCALLSHRDGAKVQLGTAATEKQYETLENKLAFLCQQGFSLENALYAHSAVTQFTLGCVLRDQEGQVAKEERETPTTDSMPPLLRQARELRDHQGAEPAFLFGLELIICGLEKQLKCESGS

SEQ ID NO: 416 - protein, 208 aa, Artificial sequence
  rSuR L1-34
MGSRLDKSKVINSALELLNEVGIEGLTTRKLAQKLGVEQPTLYWHVKNKRALLDALAIEMADRHNTHFCPLEGESWQDFLRNAARSMRCALLSHRDGAKVYLGTARTEKQYETTENVLAFLCQQGFSLENALYAVRAVPRFTLGCVLLDQERQVAKEERETPTTDSMPPLLRQARELTDHQGAEPAFLFGLELIICGLEKQLKCESGS

SEQ ID NO: 417 - protein, 208 aa, Artificial sequence
  rSuR L1-36
MGSRLDKSKVINSALELLNEVGIEGLTTRKLAQKLGVEQPTLYWHVKNKRALLDALAIEMADRHHTHFCPLEGESWQDFLRNAAKSMRCALLSHRDGAKVRLGTAWTEKQYETHENVLAFLCQQGFSLENALYALKAVSGFTLGCVLKDQEMQVAKEERETPTTDSMPPLLRQATELVDHQGAEPAFLFGLELIICGLEKQLKCESGS

SEQ ID NO: 418 - protein, 208 aa, Artificial sequence
  rSuR L1-39
MGSRLDKSKVINSALELLNEVGIEGLTTRKLAQKLGVEQPTLYWHVKNKRALLDALAIEMMDRHQTHFCPLEGESWQDFLRNTAKSYRCALLSHRDGAKVILGTRWTEKQYETRENVLAFLCQQGFSLENALYAWAAVGPFTLGCVLRDQERQVAKEERETPTTDSMPPLLRQALELMDHQGAEPAFLFGLELIICGLEKQLKCESGS

SEQ ID NO: 419 - protein, 208 aa, Artificial sequence
  rSuR L1-41
MGSRLDKSKVINSALELLNEVGIEGLTTRKLAQKLGVEQPTLYWHVKNKRALLDALAIEMLDRNQTHFCPLEGESWQDFLRNNAKSWRCALLSHRDGAKVMLGTRNTEKQYETAENGLAFLCQQGFSLENALYACRAVWTFTLGCVLDDQETQVAKEERETPTSDSMPPLLRQAMELKDHQGAEPAFLFGLELIICGLEKQLKCESGS

SEQ ID NO: 420 - DNA, 627 bp, Artificial sequence
  SuR L1-02 CDS
atgggatctagattagataaaagtaaagtgattaacagcgcattagagctgcttaatgaggtcggaatcgaaggtttaacaacccgtaaactcgcccagaagctaggtgtagagcagcctacattgtattggcatgtaaaaaataagcgagctctgctcgacgccttagccattgagatgctggataggcacgcgactcacttttgccctttagaaggggaaagctggcaagattttttacgtaataacgctaaaagttttagatgtgctttactaagtcatcgcgatggagcaaaagtatgtttaggtacagcggtgacagaaaaacagtatgaaactatggaaaatattttagcctttttatgccaacaaggtttttcactagagaatgcattatatgcaaggcgcgctgtgattgcgtttactttaggttgcgtattgtgggatcaagagtatcaagtcgctaaagaagaaagggaaacacctactactgatagtatgccgccattattacgacaagctagggaattaattgatcaccaaggtgcagagccagccttcttattcggccttgaattgatcatatgcggattagaaaaacaacttaaatgtgaaagtgggtcttaa

SEQ ID NO: 421 - DNA, 627 bp, Artificial sequence
  SuR L1-07 CDS
atgggatctagattagataaaagtaaagtgattaacagcgcattagagctgcttaatgaggtcggaatcgaaggtttaacaacccgtaaactcgcccagaagctaggtgtagagcagcctacattgtattggcatgtaaaaaataagcgagctctgctcgacgccttagccattgagatgctggataggcacaatactcacttttgccctttagaaggggaaagctggcaagattttttacgtaataacgctaaaagttggagatgtgctttactaagtcatcgcgatggagcaaaagtagtgttaggtacagcgattacagaaaaacagtatgaaactcacgaaaatccgttagcctttttatgccaacaaggtttttcactagagaatgcattatatgcaatcgccgctgtgcgtaggtttactttaggttgcgtattggtggatcaagagcggcaagtcgctaaagaagaaagggaaacacctactactgatagtatgccgccattattacgacaagctagtgaattacaggatcaccaaggtgcagagccagccttcttattcggccttgaattgatcatatgcggattagaaaaacaacttaaatgtgaaagagggtcttaa

SEQ ID NO: 422 - DNA, 627 bp, Artificial sequence
  SuR L1-09 CDS
atgggatctagattagataaaagtaaagtgattaacagcgcattagagctgcttaatgaggtcggaatcgaaggtttaacaacccgtaaactcgcccagaagctaggtgtagagcagcctacattgtattggcatgtaaaaaataagcgagctctgctcgacgccttagccattgagatgctggataggcacgcgactcacttttgccctttagaaggggaaagctggcaagattttttacgtaataacgctaaaagtatgagatgtgctttactaagtcatcgcgatggagcaaaagtatgtttaggtacaggctttacagaaaaacagtatgaaactgccgaaaatagtttagcctttttatgccaacaaggtttttcactagagaatgcattatatgcaatgcaggctgtgtgtatttttactttaggttgcgtattgttggatcaagagcttcaagtcgctaaagaagaaagggaaacacctactactgatagtatgccgccattattacgacaagctctggaattaaaggatcaccaaggtgcagagccagccttcttattcggccttgaattgatcatatgcggattagaaaaacaacttaaatgtgaaagtgggtcttaa

SEQ ID NO: 423 - DNA, 627 bp, Artificial sequence
  SuR L1-20 CDS
atgggatctagattagataaaagtaaagtgattaacagcgcattagagctgcttaatgaggtcggaatcgaaggtttaacaacccgtaaactcgcccagaagctaggtgtagagcagcctacattgtattggcatgtaaaaaataagcgagctctgctcgacgccttagccattgagatgatggataggcaccagactcacttttgccctttagaaggggaaagctggcaagattttttacgtaataacgctaaaagtatgagatgtgctttactaagtcatcgcgatggagcaaaagtatttttaggtacagcgtggacagaaaaacagtatgaaactgtggaaaatctgttagcctttttatgccaacaaggtttttcactagagaatgcattatatgcactcaatgctgtggcgacgtttactttaggttgcgtattgtgggatcaagagaagcaagtcgctaaagaagaaagggaaacacctactactgatagtatgccgccattattacgacaagctcatgaattaggtgatcaccaaggtgcagagccagccttcttattcggccttgaattgatcatatgcggattagaaaaacaacttaaatctgaaagtgggtcttaa

SEQ ID NO: 424 - DNA, 627 bp, Artificial sequence
  SuR L1-22 CDS
atgggatctagattagataaaagtaaagtgattaacagcgcattagagctgcttaatgaggtcggaatcgaaggtttaacaacccgtaaactcgcccagaagctaggtgtagagcagcctacattgtattggcatgtaaaaaataagcgagctctgctcgacgccttagccattgagatgatggataggcaccatactcacttttgccctttagaaggggaaagctggcaagattttttacgtaatactgctaaaagttatcgatgtgctttactaagtcatcgcgatggagcaaaagtatgtttaggtacagcgattacagaaaaacagtatgaaactaaggaaaataatttagcctttttatgccaacaaggtttttcactagagaatgcattatatgcacggcaggctgtgcgggtgtttactttaggttgcgtattgtttgatcaagagatgcaagtcgctaaagaagaaagggaaacacctactactgatagtatgccgccattattacgacaagcttcggaattactggatcaccaaggtgcagagccagccttcttattcggccttgaattgatcatatgcggattagaaaaacaacttaaatctgaaagtgggtcttaa

SEQ ID NO: 425 - DNA, 627 bp, Artificial sequence
  SuR L1-24 CDS
atgggatctagattagataaaagtaaagtgattaacagcgcattagagctgcttaatgaggtcggaatcgaaggtttaacaacccgtaaactcgcccagaagctaggtgtagagcagcctacattgtattggcatgtaaaaaataagcgagctctgctcgacgccttagccattgagatgctggataggcacaatactcacttttgccctttagaaggggaaagctggcaagattttttacgtaattctgctaaaagtatgagatgtgctttactaagtcatcgcgatggagcaaaagtattgttaggtacagcggtgacagaaaaacagtatgaaactacggaaaattctttagcctttttatgccaacaaggtttttcactagagaatgcattatatgcaatccgcgctgtgcgtacgtttactttaggttgcgtattggtggatcaagagcggcaagtcgctaaagaagaaagggaaacacctactactgatagtatgccgccattattacgacaagctaaggaattattggatcaccaaggtgcagagccagccttcttattcggccttgaattgatcatatgcggattagaaaaacaacttaaatgtgaaagtgggtcttaa

SEQ ID NO: 426 - DNA, 627 bp, Artificial sequence
  SuR L1-28 CDS
atgggatctagattagataaaagtaaagtgattaacagcgcattagagctgcttaatgaggtcggaatcgaaggtttaacaacccgtaaactcgcccagaagctaggtgtagagcagcctacattgtattggcatgtaaaaaataagcgagctctgctcgacgccttagccattgagatgctggataggcacgcgactcacttttgccctttagaaggggaaagctggcaagattttttacgtaataacgctaaaagtatgagatgtgctttactaagtcatcgcgatggagcaaaagtatggttaggtacagcgtggacagaaaaacagtatgaaactcccgaaaatgtgttagcctttttatgccaacaaggtttttcactagagaatgcattatatgcatcgcgcgctgtggtaacttttactttaggttgcgtattgactgatcaagagaagcaagtcgctaaagaagaaagggaaacacctactactgatagtatgccgccattattacgacaagcttgggaattacttgatcaccaaggtgcagagccagccttcttattcggccttgaattgatcatatgcggattagaaaaacaacttaaatgtgaaagtgggtcttaa

SEQ ID NO: 427 - DNA, 627 bp, Artificial sequence
  SuR L1-29 CDS
atgggatctagattagataaaagtaaagtgattaacagcgcattagagctgcttaatgaggtcggaatcgaaggtttaacaacccgtaaactcgcccagaagctaggtgtagagcagcctacattgtattggcatgtaaaaaataagcgagctctgctcgacgccttagccattgagatgatggataggcaccagactcacttttgccctttagaaggggaaagctggcaagattttttacgtaatactgctaaaagtatgagatgtgctttactaagtcatcgcgatggagcaaaagtatggttaggtacacgctggacagaaaaacagtatgaaactcccgaaaatatgttagcctttttatgccaacaaggtttttcactagagaatgcattatatgcatggagcgctgtgtgtaattttactttaggttgcgtattgtcggatcaagagaggcaagtcgctaaagaagaaagggaaacacctactactgatagtatgccgccattattacgacaagcttgggaattatctgatcaccaaggtgcagagccagccttcttattcggccttgaattgatcatatgcggattagaaaaacaacttaaatgtgaaagtgggtcttaa

SEQ ID NO: 428 - DNA, 627 bp, Artificial sequence
  SuR L1-31 CDS
atgggatctagattagataaaagtaaagtgattaacagcgcattagagctgcttaatgaggtcggaatcgaaggtttaacaacccgtaaactcgcccagaagctaggtgtagagcagcctacattgtattggcatgtaaaaaataagcgagctctgctcgacgccttagccattgagatgctggataggcacgcgactcacttttgccctttagaaggggaaagctggcaagattttttacgtaataacgctaaaagtatgagatgtgctttactaagtcatcgcgatggagcaaaagtaatgttaggtacacgcgctacagaaaaacagtatgaaactgtggaaaatcgtttagcctttttatgccaacaaggtttttcactagagaatgcattatatgcagtgcgcgctgtgcattggtttactttaggttgcgtattgattgatcaagagatgcaagtcgctaaagaagaaagggaaacacctactactgatagtatgccgccattattacgacaagcttatgaattatatgatcaccaaggtgcagagccagccttcttattcggccttgaattgatcatatgcggattagaaaaacaacttaaatgtgaaagtgggtcttaa

SEQ ID NO: 429 - DNA, 627 bp, Artificial sequence
  SuR L1-38 CDS
atgggatctagattagataaaagtaaagtgattaacagcgcattagagctgcttaatgaggtcggaatcgaaggtttaacaacccgtaaactcgcccagaagctaggtgtagagcagcctacattgtattggcatgtaaaaaataagcgagctctgctcgacgccttagccattgagatggcggataggcaccatactcacttttgccctttagaaggggaaagctggcaagattttttacgtaataacgctaaaagtatgagatgtgctttactaagtcatcgcgatggagcaaaagtatggttaggtacagcgtggacagaaaaacagtatgaaactaccgaaaatatgttagcctttttatgccaacaaggtttttcactagagaatgcattatatgcatggcgcgctgtgacgatgtttactttaggttgcgtattgcgtgatcaagagtggcaagtcgctaaagaagaaagggaaacacctactactgatagtatgccgccattattacgacaagctttggaattaggtgatcaccaaggtgcagagccagccttcttattcggccttgaattgatcatatgcggattagaaaaacaacttaaatgtgaaagtgggtcttaa

SEQ ID NO: 430 - DNA, 627 bp, Artificial sequence
  SuR L1-44 CDS
atgggatctagattagataaaagtaaagtgattaacagcgcattagagctgcttaatgaggtcggaatcgaaggtttaacaacccgtaaactcgcccagaagctaggtgtagagcagcctacattgtattggcatgtaaaaaataagcgagctctgctcgacgccttagccattgagatgctggataggcacgcgactcacttttgccctttagaaggggaaagctggcaagattttttacgtaataacgctaaaagttatagatgtgctttactaagtcatcgcgatggagcaaaagtatatttaggtacagcggtgacagaaaaacagtatgaaactgccgaaaatcagttagcctttttatgccaacaaggtttttcactagagaatgcattatatgcagtgaaggctgtggcggggtttactttaggttgcgtattgtgggatcaagagtctcaagtcgctaaagaagaaagggaaacacctactactgctagtatgccgccattattacgacaagctgtggaattagcggatcaccaaggtgcagagccagccttcttattcggccttgaattgatcatatgcggattagaaaaacaacttaaatgtgaaagtgggtcttaa

SEQ ID NO: 431 - DNA, 627 bp, Artificial sequence
  SuR L6-1B03 CDS
atgggatctagattagataaaagtaaagtgattaacagcgcattagagctgcttaatgaggtcggaatcgaaggtttaacaacccgtaaactcgcccagaagctaggtgtagagcagcctacattgtattggcatgtaaaaaataagcgagctctgctcgacgccttagccattgagatgatggataggcacgcaactcacatttgccctttagaaggggaaagctggcaagattttttacgtaataatgctaaaagtatgagatgtgctttactaagccatcgcgatggagcaaaagtatgtttaggtacacgctggacagaacaacaatatgaagctgctgaaaatatgttagcctttttatgccaacaaggtttttcactagagaatgcattatatgcagtgagtgctgtgagggtgtttactttaggttgcgtattgtttgatcaagagagccaagtcgctaaagaagaaagggaaacacctactactgctagtatgccgccattattgcgacaagcttgggaattaaaggatcaccaaggtgcagagccagccttcttattcggccttgaattgatcatatgcggattagaaaaacaacttaaatgcgaaagtgggtcttaa

SEQ ID NO: 432 - DNA, 627 bp, Artificial sequence
  SuR L6-1C03 CDS
  misc_feature (240)..(240): n is a, c, g, or t
  misc_feature (427)..(427): n is a, c, g, or t
atgggatctagattagataaaagtaaagtgattaacagcgcattagagctgcttaatgaggtcggaatcgaaggtttaacaacccgtaaactcgcccagaagctaggtgtagagcagcctacattgtattggcatgtaaaaaataagcgagctctgctcgacgccttagccattgagatgatggataggcaccaaactcactattgccctttagaaggggaaagctggcaagattttttncgtaataatgctaaaagtatgagatgtgctttactaagccatcgcgatggagcaaaagtatgtttaggtacacgctggacagaacaacaatatgaaagtgctgaaaatatgttagcctttttatgccaacaaggtttttcactagagaatgcattatatgcaatgagtgctgtgagggtgtttactntaggttgcgtattgtttgatcaagagagccaagtcgctaaagaagaaagggaaacacctactactgctagtatgccgccattattgcgacaagcttgggaattaaaggatcaccaaggtgcagagccagccttcttattcggccttgaattgatcatatgcggattagaaaaacaacttaaatgcgaaagtgggtcttaa

SEQ ID NO: 433 - DNA, 627 bp, Artificial sequence
  SuR L6-1C06 CDS
atgggatctagattagataaaagtaaagtgattaacagcgcattagagctgcttaatgaggtcggaatcgaaggtttaacaacccgtaaactcgcccagaagctaggtgtagagcagcctacattgtattggcatgtaaaaaataagcgagctctgctcgacgccttagccattgagatgatggataggcaccaaactcacttttgccctttagaaggggaaagctggcaagattttttacgtaataatgctaaaagtatgagatgtgctttactaagccatcgcgatggagcaaaagtatgtttaggtacacgctggacagaaaaacaatatgaaactgctgaaaatatgttagcctttttatgccaacaaggtttttcactagagaatgcattatatgcaatgagtgctgtgagggtgtttactttaggttgcgtattgtttgatcaagagctccaagtcgctaaagaagaaagggaaacacctactactgctagtatgccgccattagtgcgacaagtttgggaattaaaggatcaccaaggtgcagagccagccttcttattcggccttgaattgatcatatgcggattagaaaaacaacttaaatgcgaaagtgggtcttaa

SEQ ID NO: 434 - DNA, 627 bp, Artificial sequence
  SuR L6-1G06 CDS
atgggatctagattagataaaagtaaagtgattaacagcgcattagagctgcttaatgaggtcggaatcgaaggtttaacaacccgtaaactcgcccagaagctaggtgtagagcagcctacattgtattggcatgtaaaaaataagcgagctctgctcgacgccttagccattgagatgatggataggcacgcaactcactattgccctttagaaggggaaagctggcaagattttttacgtaataatgctaaaagtatgagatgtgctttactaagccatcgcgatggagcaaaagtatgtttaggtacacgctggacagaaaaacattatgaaactgctgaaaatatgttagcctttttatgccaacaaggtttttcactagagaatgcattatatgcagtgagtgctgtgagggtgtttactttaggttgcgtattgtttgatcaagagagccaagtcgctaaagaagaaagggaaacacctactactgctagtatgccgccattattgcgacaagcttgggaattaaaggatcaccaaggtgcagagccagccttcttattcggccttgaattgatcatatgcggattagaaaaacaacttaaatgcgaaagtgggtcttaa

SEQ ID NO: 435 - DNA, 627 bp, Artificial sequence
  SuR L6-1G07 CDS
atgggatctagattagataaaagtaaagtgattaacagcgcattagagctgcttaatgaggtcggaatcgaaggtttaacaacccgtaaactcgcccagaagctaggtgtagagcagcctacattgtattggcatgtaaaaaataagcgagctctgctcgacgccttagccattgagatgatggataggcacgcaactcactattgccctttagaaggggaaagctggcaagattttttacgtaatactgctaaaagtatgagatgtgctttactaagccatcgcgatggagcaaaagtatgtttaggtacacgctggacagaacaacaatatgaaagtgctgaaaatatgttagcctttttatgccaacaaggtttttcactagagaatgcattatatgcagtgagtgctgtgagggtgtttactttaggttgcgtattgtttgatcaagagagccaagtcgctaaagaagaaagggaaacacctactactgctagtatgccgccattagtgcgacaaggttgggaattaaaggatcaccaaggtgcagagccagccttcttattcggccttgaattgatcatatgcggattagaaaaacaacttaaatgcgaaagtgggtcttaa

SEQ ID NO: 436 - DNA, 627 bp, Artificial sequence
  SuR L6-1G09 CDS
atgggatctagattagataaaagtaaagtgattaacagcgcattagagctgcttaatgaggtcggaatcgaaggtttaacaacccgtaaactcgcccagaagctaggtgtagagcagcctacattgtattggcatgtaaaaaataagcgagctctgctcgacgccttagccattgagatgatggataggcaccaaactcactattgccctttagaaggggaaagctggcaagattttttacgtaataatgctaaaagtatgagatgtgctttactaagccatcgcgatggagcaaaagtatgtttaggtacacgctggacagaacaattgtatgaaactgctgaaaatatgttagcctttttatgccaacaaggtttttcactagagaatgcattatatgcagtgagtgctgtgagggtgtttactttaggttgcgtattgtttgatcaagagctccaagtcgctaaagaagaaagggaaacccctactactgctagtatgccgccattattgcgacaagcttgggaattaaaggatcaccaaggtgcagagccagccttcttattcggccttgaattgatcatatgcggattagaaaaacaacttaaatgcgaaagtgggtcttaa

SEQ ID NO: 437 - DNA, 627 bp, Artificial sequence
  SuR L6-1G10 CDS
atgggatctagattagataaaagtaaagtgattaacagcgcattagagctgcttaatgaggtcggaatcgaaggtttaacaacccgtaaactcgcccagaagctaggtgtagagcagcctacattgtattggcatgtaaaaaataagcgagctctgctcgacgccttagccattgagatgatggataggcacgcaactcactattgccctttagaaggggaaagctggcaagattttttacgtaataatgctaaaagtatgagatgtgctttactaagccatcgcgatggagcaaaagtatgtttaggtacacgctggacagaacaacaatatgaaactgctgaaaatatgttagcctttttatgccaacaaggtttttcactagagaatgcattatatgcaatgagtgctgtgagggtgtttactttaggttgcgtattgtttgatcaagagagccaagtcgctaaagaagaaagggaaacacctactactgctagtatgccgccattattgcgacaagtttgggaattaaaggatcaccaaggtgcagagccagccttcttattcggccttgaattgatcatatgcggattagaaaaacaacttaaatgcgaaagtgggtcttaa

SEQ ID NO: 438 - DNA, 627 bp, Artificial sequence
  SuR L6-1G11 CDS
atgggatctagattagataaaagtaaagtgattaacagcgcattagagctgcttaatgaggtcggaatcgaaggtttaacaacccgtaaactcgcccagaagctaggtgtagagcagcctacattgtattggcatgtaaaaaataagcgagctctgctcgacgccttagccattgagatgatggataggcaccaaactcacgtttgccctttagaaggggaaagctggcaagattttttacgtaataatgctaaaagtatgagatgtgctttactaagccatcgcgatggagcaaaagtatgtttaggtacacgctggacagaacaattgtatgaaactgctgaaaatcaattagcctttttatgccaacaaggtttttcactagagaatgcattatatgcaatgagtgctgtgagggtgtttactttaggttgcgtattgtttgatcaagagctccaagtcgctaaagaagaaagggaaacacctactactgctagtatgccaccattattgcgacaagtttgggaattaaaggatcaccaaggtgcagagccagccttcttattcggccttgaattgatcatatgcggattagaaaaacaacttaaatgcgaaagtgggtcttaa

SEQ ID NO: 439 - DNA, 627 bp, Artificial sequence
  SuR L6-1H12 CDS
atgggatctagattagataaaagtaaagtgattaacagcgcattagagctgcttaatgaggtcggaatcgaaggtttaacaacccgtaaactcgcccagaagctaggtgtagagcagcctacattgtattggcatgtaaaaaataagcgagctctgctcgacgccttagccattgagatgatggataggcaccaaactcacatttgccctttagaaggggaaagctggcaagattttttacgtaatactgctaaaagtatgagatgtgctttactaagccatcgcgatggagcaaaagtatgtttaggtacacgctggacagaacaacattatgaaactgctgaaaatcaattagcctttttatgccaacaaggtttttcactagagaatgcattatatgcaatgagtgctgtgagggtgtttactttaggttgcgtattgtttgatcaagagagccaagtcgctaaagaagaaagggaaacacctactactgctagtatgccgccattagtgcgacaagcttgggaattaaaggatcaccaaggtgcagagccagccttcttattcggccttgaattgatcatatgcggattagaaaaacaacttaaatgcgaaagtgggtcttaa

SEQ ID NO: 440 - DNA, 627 bp, Artificial sequence
  SuR L6-2A01 CDS
atgggatctagattagataaaagtaaagtgattaacagcgcattagagctgcttaatgaggtcggaatcgaaggtttaacaacccgtaaactcgcccagaagctaggtgtagagcagcctacattgtattggcatgtaaaaaataagcgagctctgctcgacgccttagccattgagatgatggataggcaccaaactcacgtgtgccctttagaaggggaaagctggcaagattttttacgtaataatgctaaaagtatgagatgtgctttactaagccatcgcgatggagcaaaagtatgtttaggtacacgctggacagaaaaacaatatgaagctgctgaaaatatgttagcctttttatgccaacaaggtttttcactagagaatgcattatatgcagtgagtgctgtgagggtgtttactttaggttgcgtattgtttgatcaagagagccaagtcgctaaagaagaaagggaaacacctactactgctagtatgccgccattattgcgacaaggttgggaattaaaggatcaccaaggtgcagagccagccttcttattcggccttgaattgatcatatgcggattagaaaaacaacttaaatgcgaaagtgggtcttaa

SEQ ID NO: 441 - DNA, 627 bp, Artificial sequence
  SuR L6-2A02 CDS
atgggatctagattagataaaagtaaagtgattaacagcgcattagagctgcttaatgaggtcggaatcgaaggtttaacaacccgtaaactcgcccagaagctaggtgtagagcagcctacattgtattggcatgtaaaaaataagcgagctctgctcgacgccttagccattgagatgatggataggcaccaaactcactattgccctttagaaggggaaagctggcaagattttttacgtaatactgctaaaagtatgagatgtgctttactaagccatcgcgatggagcaaaagtatgtttaggtacacgctggacagaacaacattatgaaactgctgaaaatatgttagcctttttatgccaacaaggtttttcactagagaatgcattatatgcaatgagtgctgtgagggtgtttactttaggttgcgtattgtttgatcaagagctccaagtcgctaaagaagaaagggaaacacctactactgctagtatgccgccattagtgcgacaagtttgggaattaaaggatcaccaaggtgcagagccagccttcttattcggccttgaattgatcatatgcggattagaaaaacaacttaaatgcgaaagtgggtcttaa

SEQ ID NO: 442 - DNA, 627 bp, Artificial sequence
  SuR L6-2A04 CDS
atgggatctagattagataaaagtaaagtgattaacagcgcattagagctgcttaatgaggtcggaatcgaaggtttaacaacccgtaaactcgcccagaagctaggtgtagagcagcctacattgtattggcatgtaaaaaataagcgagctctgctcgacgccttagccattgagatgatggataggcaccaaactcacgtgtgccctttagaaggggaaagctggcaagattttttacgtaataatgctaaaagtatgagatgtgctttactaagccatcgcgatggagcaaaagtatgtttaggtacacgctggacagaacaattgtatgaaactgctgaaaatcaattagcctttttatgccaacaaggtttttcactagagaatgcattatatgcaatgagtgctgtgaggaactttactttaggttgcgtattgtttgatcaagagagccaagtcgctaaagaagaaagggaaacacctactactgctagtatgccgccattagtgcgacaagcttgggaattaaaggatcaccaaggtgcagagccagccttcttattcggccttgaattgatcatatgcggattagaaaaacaacttaaatgcgaaagtgggtcttaa

SEQ ID NO: 443 - DNA, 627 bp, Artificial sequence
  SuR L6-2A06 CDS
atgggatctagattagataaaagtaaagtgattaacagcgcattagagctgcttaatgaggtcggaatcgaaggtttaacaacccgtaaactcgcccagaagctaggtgtagagcagcctacattgtattggcatgtaaaaaataagcgagctctgctcgacgccttagccattgagatgatggataggcaccaaactcactattgccctttagaaggggaaagctggcaagattttttacgtaataatgctaaaagtatgagatgtgctttactaagccatcgcgatggagcaaaagtatgtttaggtacacgctggacagaacaattgtatgaaactgctgaaaatatgttagcctttttatgccaacaaggtttttcactagagaatgcattatatgcagtgagtgctgtgagggtgtttactttaggttgcgtattgtttgatcaagagagccaagtcgctaaagaagaaagggaaacacctactactgctagtatgccgccattagtgcgacaagtttgggaattaaaggatcaccaaggtgcagagccagccttcttattcggccttgaattgatcatatgcggattagaaaaacaacttaaatgcgaaagtgggtcttaa

SEQ ID NO: 444 - DNA, 627 bp, Artificial sequence
  SuR L6-2A12 CDS
atgggatctagattagataaaagtaaagtgattaacagcgcattagagctgcttaatgaggtcggaatcgaaggtttaacaacccgtaaactcgcccagaagctaggtgtagagcagcctacattgtattggcatgtaaaaaataagcgagctctgctcgacgccttagccattgagatgatggataggcacgcaactcacgtttgccctttagaaggggaaagctggcaagattttttacgtaataatgctaaaagtatgagatgtgctttactaagccatcgcgatggagcaaaagtatgtttaggtacacgctggacagaacaaatgtatgaaactgctgaaaatcaattagcctttttatgccaacaaggtttttcactagagaatgcattatatgcaatgagtgctgtgagggtgtttactttaggttgcgtattgtttgatcaagagagccaagtcgctaaagaagaaagggaaacacctactactgctagtatgccgccattagtgcgacaagcttgggaattaaaggatcaccaaggtgcagagccagccttcttattcggccttgaattgatcatatgcggattagaaaaacaacttaaatgcgaaagtgggtcttaa

SEQ ID NO: 445 - DNA, 626 bp, Artificial sequence
  SuR L6-2B04 CDS
atgggatctagattagataaaagtaaagtgattaacagcgcattagagctgcttaatgaggtcggaatcgaaggtttaacaacccgtaaactcgcccagaagctaggtgtagagcagcctacattgtattggcatgtaaaaaataagcgagctctgctcgacgccttagccattgagatgatggataggcaccaaactcacgtgtgccctttagaaggggaaagctggcaagattttttacgtaataatgctaaaagtatgagatgtgctttactaagccatcgcgatggagcaaaagtatgtttaggtacacgctggacagaaaaacaatatgaaagtgctgaaaatatgttagcctttttatgccaacaaggtttttcactagagaatgcattatatgcagtgagtgctgtgagggtgtttactttaggttgcgtattgtttgatcaagagctccaagtcgctaaagaagaaagggaaacacctactactgctagtatgccgccattattgcgacaaggttgggaattaaatgatcaccaaggtgcagagccagccttcttattcggccttgaattgatcatatgcggattagaaaaacaacttaaatgcgaaagtgggtctaa

SEQ ID NO: 446 - DNA, 627 bp, Artificial sequence
  SuR L6-2B06 CDS
atgggatctagattagataaaagtaaagtgattaacagcgcattagagctgcttaatgaggtcggaatcgaaggtttaacaacccgtaaactcgcccagaagctaggtgtagagcagcctacattgtattggcatgtaaaaaataagcgagctctgctcgacgccttagccattgagatgatggataggcaccaaactcactattgccctttagaaggggaaagctggcaagattttttacgtaataatgctaaaagtatgagatgtgctttactaagccatcgcgatggagcaaaagtatgtttaggtacacgctggacagaacaacattatgaaggtgctgaaaatatgttagcctttttatgccaacaaggtttttcactagagaatgcattatatgcaatgagtgctgtgagggtgtttactttaggttgcgtattgtttgatcaagagctccaagtcgctaaagaagaaagggaaacacctactactgctagtatgccgccattagtgcgacaagtttgggaattaaaggatcaccaaggtgcagagccagccttcttattcggccttgaattgatcatatgcggattagaaaaacaacttaaatgcgaaagtgggtcttaa

SEQ ID NO: 447 - DNA, 627 bp, Artificial sequence
  SuR L6-2B08 CDS
  misc_feature (455)..(455): n is a, c, g, or t
atgggatctagattagataaaagtaaagtgattaacagcgcattagagctgcttaatgaggtcggaatcgaaggtttaacaacccgtaaactcgcccagaagctaggtgtagagcagcctacattgtattggcatgtaaaaaataagcgagctctgctcgacgccttagccattgagatgatggataggcacgcaactcacgtttgccctttagaaggggaaagctggcaagattttttacgtaataatgctaaaagtatgagatgtgctttactaagccatcgcgatggagcaaaagtatgtttaggtacacgctggacagaacaaatgtatgaaactgctgaaaatcaattagcctttttatgccaacaaggtttttcactagagaatgcattatatgcaatgagtgctgtgagggtgtttactttaggttgcgtattgtttgatcaagaganccaagtcgctaaagaagaaagggaaacacctactactgctagtatgccgccattattgcgacaagtttgggaattaaaggatcaccaaggtgcagagccagccttcttattcggccttgaattgatcatatgcggattagaaaaacaacttaaatgcgaaagtgggtcttaa

SEQ ID NO: 448 - DNA, 627 bp, Artificial sequence
  SuR L6-2B09 CDS
atgggatctagattagataaaagtaaagtgattaacagcgcattagagctgcttaatgaggtcggaatcgaaggtttaacaacccgtaaactcgcccagaagctaggtgtagagcagcctacattgtattggcatgtaaaaaataagcgagctctgctcgacgccttagccattgagatgatggataggcacgcaactcactattgccctttagaaggggaaagctggcaagattttttacgtaatactgctaaaagtatgagatgtgctttactaagccatcgcgatggagcaaaagtatgtttaggtacacgctggacagaaaaacaatatgaaactgctgaaaatcaattagcctttttatgccaacaaggtttttcactagagaatgcattatatgcaatgagtgctgtgagggtgtttactttaggttgcgtattgtttgatcaagagctccaagtcgctaaagaagaaagggaaacacctactactgctagtatgccgccattagtgcgacaagtttgggaattaaaggatcaccaaggtgcagagccagccttcttattcggccttgaattgatcatatgcggattagaaaaacaacttaaatgcgaaagtgggtcttaa

SEQ ID NO: 449 - DNA, 627 bp, Artificial sequence
  SuR L6-2B10 CDS
  misc_feature (193)..(193): n is a, c, g, or t
atgggatctagattagataaaagtaaagtgattaacagcgcattagagctgcttaatgaggtcggaatcgaaggtttaacaacccgtaaactcgcccagaagctaggtgtagagcagcctacattgtattggcatgtaaaaaataagcgagctctgctcgacgccttagccattgagatgatggataggcacncaactcactattgccctttagaaggggaaagctggcaagattttttacgtaatactgctaaaagtatgagatgtgctttactaagccatcgcgatggagcaaaagtatgtttaggtacacgctggacagaaaaacaatatgaaactgctgaaaatcaattagcctttttatgccaacaaggtttttcactagagaatgcattatatgcaatgagtgctgtgagggtgtttactttaggttgcgtattgtttgatcaagagagccaagtcgctaaagaagaaagggaaacacctactactgctagtatgccgccattagtgcgacaaggttgggaattaaaggatcaccaaggtgcagagccagccttcttattcggccttgaattgatcatatgcggattagaaaaacaacttaaatgcgaaagtgggtcttaa

SEQ ID NO: 450 - DNA, 627 bp, Artificial sequence
  SuR L6-2B11 CDS
atgggatctagattagataaaagtaaagtgattaacagcgcattagagctgcttaatgaggtcggaatcgaaggtttaacaacccgtaaactcgcccagaagctaggtgtagagcagcctacattgtattggcatgtaaaaaataagcgagctctgctcgacgccttagccattgagatgatggataggcaccaaactcacatgtgccctttagaaggggaaagctggcaagattttttacgtaataatgctaaaagtatgagatgtgctttactaagccatcgcgatggagcaaaagtatgtttaggtacacgctggacagaaaaacattatgaaactgctgaaaatatgttagcctttttatgccaacaaggtttttcactagagaatgcattatatgcagtgagtgctgtgagggtgtttactttaggttgcgtattgtttgatcaagagagccaagtcgctaaagaagaaagggaaacacctactactgctagtatgccgccattagtgcgacaaggttgggaattaaaggatcaccaaggtgcagagccagccttcttattcggccttgaattgatcatatgcggattagaaaaacaacttaaatgcgaaagtgggtcttaa

SEQ ID NO: 451 - DNA, 627 bp, Artificial sequence
  SuR L6-2C02 CDS
atgggatctagattagataaaagtaaagtgattaacagcgcattagagctgcttaatgaggtcggaatcgaaggtttaacaacccgtaaactcgcccagaagctaggtgtagagcagcctacattgtattggcatgtaaaaaataagcgagctctgctcgacgccttagccattgagatgatggataggcaccaaactcacttgtgccctttagaaggggaaagctggcaagattttttacgtaataatgctaaaagtatgagatgtgctttactaagccatcgcgatggagcaaaagtatgtttaggtacacgctggacagaaaaacaatatgaaagtgctgaaaatatgttagcctttttatgccaacaaggtttttcactagagaatgcattatatgcaatgagtgctgtgagggtgtttactttaggttgcgtattgtttgatcaagagagccaagtcgctaaagaagaaagggaaacacctactactgctagtatgccgccattagtgcgacaagtttgggaattaaaggatcaccaaggtgcagagccagccttcttattcggccttgaattgatcatatgcggattagaaaaacaacttaaatgcgaaagtgggtcttaa

SEQ ID NO: 452 - DNA, 627 bp, Artificial sequence
  SuR L6-2C05 CDS
atgggatctagattagataaaagtaaagtgattaacagcgcattagagctgcttaatgaggtcggaatcgaaggtttaacaacccgtaaactcgcccagaagctaggtgtagagcagcctacattgtattggcatgtaaaaaataagcgagctctgctcgacgccttagccattgagatgatggataggcaccaaactcactattgccctttagaaggggaaagctggcaagattttttacgtaatactgctaaaagtatgagatgtgctttactaagccatcgcgatggagcaaaagtatgtttaggtacacgctggacagaaaaacattatgaaactgctgaaaatcaattagcctttttatgccaacaaggtttttcactagagaatgcattatatgcagtgagtgctgtgagggtgtttactttaggttgcgtattgtttgatcaagagagccaagtcgctaaagaagaaagggaaacacctactactgctagtatgccgccattagtgcgacaagtttgggaattaaaggatcaccaaggtgcagagccagccttcttattcggccttgaattgatcatatgcggattagaaaaacaacttaaatgcgaaagtgggtcttaa

SEQ ID NO: 453 - DNA, 627 bp, Artificial sequence
  SuR L6-2C09 CDS
atgggatctagattagataaaagtaaagtgattaacagcgcattagagctgcttaatgaggtcggaatcgaaggtttaacaacccgtaaactcgcccagaagctaggtgtagagcagcctacattgtattggcatgtaaaaaataagcgagctctgctcgacgccttagccattgagatgatggataggcaccaaactcactattgccctttagaaggggaaagctggcaagattttttacgtaatactgctaaaagtatgagatgtgctttactaagccatcgcgatggagcaaaagtatgtttaggtacacgctggacagaacaattgtatgaaactgctgaaaatcaattagcctttttatgccaacaaggtttttcactagagaatgcattatatgcaatgagtgctgtgagggtgtttactttaggttgcgtattgtttgatcaagagctccaagtcgctaaagaagaaagggaaacacctactactgctagtatgccgccattattgcgacaagcttgggaattaaaggatcaccaaggtgcagagccagccttcttattcggccttgaattgatcatatgcggattagaaaaacaacttaaatgcgaaagtgggtcttaa

SEQ ID NO: 454 - DNA, 627 bp, artificial sequence
  SuR L6-2C10 CDS
  misc_feature (204)..(204): n is a, c, g, or t
  misc_feature (337)..(337): n is a, c, g, or t
atgggatctagattagataaaagtaaagtgattaacagcgcattagagctgcttaatgaggtcggaatcgaaggtttaacaacccgtaaactcgcccagaagctaggtgtagagcagcctacattgtattggcatgtaaaaaataagcgagctctgctcgacgccttagccattgagatgatggataggcaccaaactcactantgccctttagaaggggaaagctggcaagattttttacgtaatactgctaaaagtatgagatgtgctttactaagccatcgcgatggagcaaaagtatgtttaggtacacgctggacagaacaacaatatgaanctgctgaaaatctgttagcctttttatgccaacaaggtttttcactagagaatgcattatatgcaatgagtgctgtgagggtgtttactttaggttgcgtattgtttgatcaagagatccaagtcgctaaagaagaaagggaaacacctactactgctagtatgccgccattattgcgacaagttttggaattaaaggatcaccaaggtgcagagccagccttcttattcggccttgaattgatcatatgcggattagaaaaacaacttaaatgcgaaagtgggtcttaa

SEQ ID NO: 455 - DNA, 627 bp, Artificial sequence
  SuR L6-2C11 CDS
atgggatctagattagataaaagtaaagtgattaacagcgcattagagctgcttaatgaggtcggaatcgaaggtttaacaacccgtaaactcgcccagaagctaggtgtagagcagcctacattgtattggcatgtaaaaaataagcgagctctgctcgacgccttagccattgagatgatggataggcaccaaactcactattgccctttagaaggggaaagctggcaagattttttacgtaatactgctaaaagtatgagatgtgctttactaagccatcgcgatggagcaaaagtatgtttaggtacacgctggacagaaaaacattatgaaactgctgaaaatatgttagcctttttatgccaacaaggtttttcactagagaatgcattatatgcagtgagtgctgtgagggtgtttactttaggttgcgtattgtttgatcaagagagccaagtcgctaaagaagaaagggaaacacctactactgctagtatgccgccattattgcgacaagtttgggaattaaaggatcaccaaggtgcagagccagccttcttattcggccttgaattgatcatatgcggattagaaaaacaacttaaatgcgaaagtgggtcttaa

SEQ ID NO: 456 - DNA, 627 bp, Artificial sequence
  SuR L6-2D01 CDS
atgggatctagattagataaaagtaaagtgattaacagcgcattagagctgcttaatgaggtcggaatcgaaggtttaacaacccgtaaactcgcccagaagctaggtgtagagcagcctacattgtattggcatgtaaaaaataagcgagctctgctcgacgccttagccattgagatgatggataggcaccaaactcacgtttgccctttagaaggggaaagctggcaagattttttacgtaataatgctaaaagtatgagatgtgctttactaagccatcgcgatggagcaaaagtatgtttaggtacacgctggacagaacaattgtatgaaactgctgaaaatatgttagcctttttatgccaacaaggtttttcactagagaatgcattatatgcaatgagtgctgtgagggtgtttactttaggttgcgtattgtttgatcaagagagccaagtcgctaaagaagaaagggaaacacctactactgctagtatgccgccattagtgcgacaaggttgggaattaaaggatcaccaaggtgcagagccagccttcttattcggccttgaattgatcatatgcggattagaaaaacaacttaaatgcgaaagtgggtcttaa

SEQ ID NO: 457 - DNA, 627 bp, Artificial sequence
  SuR L6-2D02 CDS
  misc_feature (328)..(328): n is a, c, g, or t
atgggatctagattagataaaagtaaagtgattaacagcgcattagagctgcttaatgaggtcggaatcgaaggtttaacaacccgtaaactcgcccagaagctaggtgtagagcagcctacattgtattggcatgtaaaaaataagcgagctctgctcgacgccttagccattgagatgatggataggcacgcaactcacttgtgccctttagaaggggaaagctggcaagattttttacgtaataatgctaaaagtatgagatgtgctttactaagccatcgcgatggagcaaaagtatgtttaggtacacgctggacagaaaaantgtatgaaagtgctgaaaatcaattagcctttttatgccaacaaggtttttcactagagaatgcattatatgcaatgagtgctgtgagggtgtttactttaggttgcgtattgtttgatcaagagctccaagtcgctaaagaagaaagggaaacacctactactgctagtatgccgccattattgcgacaagcttgggaattaaaggatcaccaaggtgcagagccagccttcttattcggccttgaattgatcatatgcggattagaaaaacaacttaaatgcgaaagtgggtcttaa

SEQ ID NO: 458 - DNA, 627 bp, Artificial sequence
  SuR L6-2D03 CDS
atgggatctagattagataaaagtaaagtgattaacagcgcattagagctgcttaatgaggtcggaatcgaaggtttaacaacccgtaaactcgcccagaagctaggtgtagagcagcctacattgtattggcatgtaaaaaataagcgagctctgctcgacgccttagccattgagatgatggataggcaccaaactcactattgccctttagaaggggaaagctggcaagattttttacgtaatactgctaaaagtatgagatgtgctttactaagccatcgcgatggagcaaaagtatgtttaggtacacgctggacagaacaacaatatgaaactgctgaaaatatgttagcctttttatgccaacaaggtttttcactagagaatgcattatatgcagtgagtgctgtgaggaactttactttaggttgcgtattgtttgatcaagagagccaagtcgctaaagaagaaagggaaacacctactactgctagtatgccgccattagtgcgacaagcttgggaattaaaggatcaccaaggtgcagagccagccttcttattcggccttgaattgatcatatgcggattagaaaaacaacttaaatgcgaaagtgggtcttaa

SEQ ID NO: 459 - DNA, 627 bp, Artificial sequence
  SuR L6-2D04 CDS
atgggatctagattagataaaagtaaagtgattaacagcgcattagagctgcttaatgaggtcggaatcgaaggtttaacaacccgtaaactcgcccagaagctaggtgtagagcagcctacattgtattggcatgtaaaaaataagcgagctctgctcgacgccttagccattgagatgatggataggcaccaaactcacttttgccctttagaaggggaaagctggcaagattttttacgtaataatgctaaaagtatgagatgtgctttactaagccatcgcgatggagcaaaagtatggttaggtacacgctggacagaacaaatgtatgaaactgctgaaaatatgttagcctttttatgccaacaaggtttttcactagagaatgcattatatgcagtgagtgctgtgaggaactttactttaggttgcgtattgtttgatcaagagagccaagtcgctaaagaagaaagggaaacacctactactgctagtatgccgccattattgcgacaaggttgggaattaaaggatcaccaaggtgcagagccagccttcttattcggccttgaattgatcatatgcggattagaaaaacaacttaaatgcgaaagtgggtcttaa

SEQ ID NO: 460 - DNA, 627 bp, Artificial sequence
  SuR L6-2D07 CDS
atgggatctagattagataaaagtaaagtgattaacagcgcattagagctgcttaatgaggtcggaatcgaaggtttaacaacccgtaaactcgcccagaagctaggtgtagagcagcctacattgtattggcatgtaaaaaataagcgagctctgctcgacgccttagccattgagatgatggataggcaccaaactcacttttgccctttagaaggggaaagctggcaagattttttacgtaatactgctaaaagtatgagatgtgctttactaagccatcgcgatggagcaaaagtatgtttaggtacacgctggacagaacaacaatatgaaactgctgaaaatatgttagcctttttatgccaacaaggtttttcactagagaatgcattatatgcaatgagtgctgtgagggtgtttactttaggttgcgtattgtttgatcaagagagccaagtcgctaaagaagaaagggaaacacctactactgctagtatgccgccattagtgcgacaagcttgggaattaaaggatcaccaaggtgcagagccagccttcttattcggccttgaattgatcatatgcggattagaaaaacaacttaaatgcgaaagtgggtcttaa

SEQ ID NO: 461 - DNA, 627 bp, Artificial sequence
  SuR L6-2D11 CDS
atgggatctagattagataaaagtaaagtgattaacagcgcattagagctgcttaatgaggtcggaatcgaaggtttaacaacccgtaaactcgcccagaagctaggtgtagagcagcctacattgtattggcatgtaaaaaataagcgagctctgctcgacgccttagccattgagatgatggataggcaccaaactcactattgccctttagaaggggaaagctggcaagattttttacgtaatactgctaaaagtatgagatgtgctttactaagccatcgcgatggagcaaaagtatgtttaggtacacgctggacagaacaacaatatgaaagtgctgaaaatcaattagcctttttatgccaacaaggtttttcactagagaatgcattatatgcagtgagtgctgtgagggtgtttactttaggttgcgtattgtttgatcaagagagccaagtcgctaaagaagaaagggaaacacctactactgctagtatgccgccattattgcgacaagcttgggaattaaaggatcaccaaggtgcagagccagccttcttattcggccttgaattgatcatatgcggattagaaaaacaacttaaatgcgaaagtgggtcttaa

SEQ ID NO: 462 - DNA, 627 bp, Artificial sequence
  SuR L6-2D12 CDS
atgggatctagattagataaaagtaaagtgattaacagcgcattagagctgcttaatgaggtcggaatcgaaggtttaacaacccgtaaactcgcccagaagctaggtgtagagcagcctacattgtattggcatgtaaaaaataagcgagctctgctcgacgccttagccattgagatgatggataggcaccaaactcacatgtgccctttagaaggggaaagctggcaagattttttacgtaataatgctaaaagtatgagatgtgctttactaagccatcgcgatggagcaaaagtatgtttaggtacacgctggacagaaaaaatgtatgaagctgctgaaaatatgttagcctttttatgccaacaaggtttttcactagagaatgcattatatgcagtgagtgctgtgagggtgtttactttaggttgcgtattgtttgatcaagagctccaagtcgctaaagaagaaagggaaacacctactactgctagtatgccgccattattgcgacaagcttgggaattaaaggatcaccaaggtgcagagccagccttcttattcggccttgaattgatcatatgcggattagaaaaacaacttaaatgcgaaagtgggtcttaa

SEQ ID NO: 463 - DNA, 627 bp, Artificial sequence
  SuR L6-2E02 CDS
atgggatctagattagataaaagtaaagtgattaacagcgcattagagctgcttaatgaggtcggaatcgaaggtttaacaacccgtaaactcgcccagaagctaggtgtagagcagcctacattgtattggcatgtaaaaaataagcgagctctgctcgacgccttagccattgagatgatggataggcacgcaactcactattgccctttagaaggggaaagctggcaagattttatacgtaatactgctaaaagtatgagatgtgctttactaagccatcgcgatggagcaaaagtatgtttaggtacacgctggacagaaaaacattatgaaactgctgaaaatatgttagcctttttatgccaacaaggtttttcactagagaatgcattatatgcagtgagtgctgtggggaactttactttaggttgcgtattgtttgatcaagagagccaagtcgctaaagaagaaagggaaacacctactactgctagtatgccgccattattgcgacaagtttgggaattaaaggatcaccaaggtgcagagccagccttcttattcggccttgaattgatcatatgcggattagaaaaacaacttaaatgcgaaagtgggtcttaa

SEQ ID NO: 464 - DNA, 627 bp, Artificial sequence
  SuR L62E03 CDS
atgggatctagattagataaaagtaaagtgattaacagcgcattagagctgcttaatgaggtcggaatcgaaggtttaacaacccgtaaactcgcccagaagctaggtgtagagcagcctacattgtattggcatgtaaaaaataagcgagctctgctcgacgccttagccattgagatgatggataggcacgcaactcacttgtgccctttagaaggggaaagctggcaagattttttacgtaatactgctaaaagtatgagatgtgctttactaagccatcgcgatggagcaaaagtatgtttaggtacacgctggacagaaaaacaatatgaaagtgctgaaaatcaattagcctttttatgccaacaaggtttttcactagagaatgcattatatgcaatgagtgctgtgagggtgtttactttaggttgcgtattgtttgatcaagagagccaagtcgctaaagaagaaagggaaacacctactactgctagtatgccgccattattgcgacaagtttgggaattaaaggatcaccaaggtgcagagccagccttcttattcggccttgaattgatcatatgcggattagaaaaacaacttaaatgcgaaagtgggtcttaa

SEQ ID NO: 465 - DNA, 627 bp, Artificial sequence
  SuR L6-2E04 CDs
atgggatctagattagataaaagtaaagtgattaacagcgcattagagctgcttaatgaggtcggaatcgaaggtttaacaacccgtaaactcgcccagaagctaggtgtagagcagcctacattgtattggcatgtaaaaaataagcgagctctgctcgacgccttagccattgagatgatggataggcaccaaactcactattgccctttagaaggggaaagctggcaagattttttacgtaataatgctaaaagtatgagatgtgctttactaagccatcgcgatggagcaaaagtatgtttaggtacacgctggacagaacaaatgtatgaaagtgctgaaaatatgttagcctttttatgccaacaaggtttttcactagagaatgcattatatgcagtgagtgctgtgagggtgtttactttaggttgcgtattgtttgatcaagagagccaagtcgctaaagaagaaagggaaacacctactactgctagtatgccgccattattgcgacaaggttgggaattaaaggatcaccaaggtgcagagccagccttcttattcggccttgaattgatcatatgcggattagaaaaacaacttaaatgcgaaagtgggtcttaa

SEQ ID NO: 466 - DNA, 627 bp, Artificial sequence
  SuR L6-2E05 CDS
atgggatctagattagataaaagtaaagtgattaacagcgcattagagctgcttaatgaggtcggaatcgaaggtttaacaacccgtaaactcgcccagaagctaggtgtagagcagcctacattgtattggcatgtaaaaaataagcgagctctgctcgacgccttagccattgagatgatggataggcaccaaactcacttttgccctttagaaggggaaagctggcaagattttttacgtaataatgctaaaagtatgagatgtgctttactaagccatcgcgatggagcaaaagtatgtttaggtacacgctggacagaacaaatgtatgaaggtgctgaaaatatgttagcctttttatgccaacaaggtttttcactagagaatgcattatatgcaatgagtgctgtgagggtgtttactttaggttgcgtattgtttgatcaagagagccaagtcgctaaagaagaaagggaaacacctactactgctagtatgccgccattattgcgacaaggttgggaattaaaggatcaccaaggtgcagagccagccttcttattcggccttgaattgatcatatgcggattagaaaaacaacttaaatgcgaaagtgggtcttaa

SEQ ID NO: 467 - DNA, 627 bp, Artificial sequence
  SuR L6-2E07 CDS
atgggatctagattagataaaagtaaagtgattaacagcgcattagagctgcttaatgaggtcggaatcgaaggtttaacaacccgtaaactcgcccagaagctaggtgtagagcagcctacattgtattggcatgtaaaaaataagcgagctctgctcgacgccttagccattgagatgatggataggcaccaaactcactattgccctttagaaggggaaagctggcaagattttttacgtaataatgctaaaagtatgagatgtgctttactaagccatcgcgatggagcaaaagtatgtttaggtacacgctggacagaacaacattatgaagctgctgaaaatatgttagcctttttatgccaacaaggtttttcactagagaatgcattatatgcaatgagtgctgtgagggtgtttactttaggttgcgtattgtttgatcaagagagccaagtcgctaaagaagaaagggaaacacctactactgctagtatgccgccattagtgcgacaagcttgggaattaaaggatcaccaaggtgcagagccagccttcttattcggccttgaattgatcatatgcggattagaaaaacaacttaaatgcgaaagtgggtcttaa

SEQ ID NO: 468 - DNA, 627 bp, Artificial sequence
  SuR L6-2E08 CDS
atgggatctagattagataaaagtaaagtgattaacagcgcattagagctgcttaatgaggtcggaatcgaaggtttaacaacccgtaaactcgcccagaagctaggtgtagagcagcctacattgtattggcatgtaaaaaataagcgagctctgctcgacgccttagccattgagatgatggataggcacgcaactcactattgccctttagaaggggaaagctggcaagattttttacgtaataatgctaaaagtatgagatgtgctttactaagccatcgcgatggagcaaaagtatgtttaggtacacgctggacagaacaattgtatgaaactgctgaaaatcaattagcctttttatgccaacaaggtttttcactagagaatgcattatatgcaatgagtgctgtgaggaactttactttaggttgcgtattgtttgatcaagagagccaagtcgctaaagaagaaagggaaacacctactactgctagtatgccgccattagtgcgacaagcttgggaattaaaggatcaccaaggtgcagagccagccttcttattcggccttgaattgatcatatgcggattagaaaaacaacttaaatgcgaaagtgggtcttaa

SEQ ID NO: 469 - DNA, 627 bp, Artificial sequence
  SuR L6-2E09 CDS
atgggatctagattagataaaagtaaagtgattaacagcgcattagagctgcttaatgaggtcggaatcgaaggtttaacaacccgtaaactcgcccagaagctaggtgtagagcagcctacattgtattggcatgtaaaaaataagcgagctctgctcgacgccttagccattgagatgatggataggcacgcaactcacatgtgccctttagaaggggaaagctggcaagattttttacgtaatactgctaaaagtatgagatgtgctttactaagccatcgcgatggagcaaaagtatgtttaggtacacgctggacagaaaaacaatatgaaactgctgaaaatatgttagcctttttatgccaacaaggtttttcactagagaatgcattatatgcagtgagtgctgtgagggtgtttactttaggttgcgtattgtttgatcaagagagccaagtcgctaaagaagaaagggaaacacctactactgctagtatgccgccattattgcgacaagtttgggaattaaaggatcaccaaggtgcagagccagccttcttattcggccttgaattgatcatatgcggattagaaaaacaacttaaatgcgaaagtgggtcttaa

SEQ ID NO: 470 - DNA, 627 bp, Artificial sequence
  SuR L6-2E11 CDS
atgggatctagattagataaaagtaaagtgattaacagcgcattagagctgcttaatgaggtcggaatcgaaggtttaacaacccgtaaactcgcccagaagctaggtgtagagcagcctacattgtattggcatgtaaaaaataagcgagctctgctcgacgccttagccattgagatgatggataggcacgcaactcactattgccctttagaaggggaaagctggcaagattttttacgtaatactgctaaaagtatgagatgtgctttactaagccatcgcgatggagcaaaagtatgtttaggtacacgctggacagaaaaattgtatgaaactgctgaaaatatgttagcctttttatgccaacaaggtttttcactagagaatgcattatatgcagtgagtgctgtgagggtgtttactttaggttgcgtattgtttgatcaagagctccaagtcgctaaagaagaaagggaaacacctactactgctagtatgccgccattagtgcgacaagcttgggaattaaaggatcaccaaggtgcagagccagccttcttattcggccttgaattgatcatatgcggattagaaaaacaacttaaatgcgaaagtgggtcttaa

SEQ ID NO: 471 - DNA, 627 bp, Artificial sequence
  SuR L6-2F08 CDS
atgggatctagattagataaaagtaaagtgattaacagcgcattagagctgcttaatgaggtcggaatcgaaggtttaacaacccgtaaactcgcccagaagctaggtgtagagcagcctacattgtattggcatgtaaaaaataagcgagctctgctcgacgccttagccattgagatgatggataggcacgcaactcacttttgccctttagaaggggaaagctggcaagattttttacgtaatactgctaaaagtatgagatgtgctttactaagccatcgcgatggagcaaaagtatgtttaggtacacgctggacagaacaattgtatgaaactgctgaaaatatgttagcctttttatgccaacaaggtttttcactagagaatgcattatatgcaatgagtgctgtgagggtgtttactttaggttgcgtattgtttgatcaagagagccaagtcgctaaagaagaaagggaaacacctactactgctagtatgccgccattagtgcgacaaggttgggaattaaaggatcaccaaggtgcagagccagccttcttattcggccttgaattgatcatatgcggattagaaaaacaacttaaatgcgaaagtgggtcttaa

SEQ ID NO: 472 - DNA, 627 bp, Artificial sequence
  SuR L6-2F10 CDS
atgggatctagattagataaaagtaaagtgattaacagcgcattagagctgcttaatgaggtcggaatcgaaggtttaacaacccgtaaactcgcccagaagctaggtgtagagcagcctacattgtattggcatgtaaaaaataagcgagctctgctcgacgccttagccattgagatgatggataggcaccaaactcacttgtgccctttagaaggggaaagctggcaagattttttacgtaataatgctaaaagtatgagatgtgctttactcagccatcgcgatggagcaaaagtatgtttaggtacacgctggacagaaaaacattatgaagctgctgaaaatcaattagcctttttatgccaacaaggtttttcactagagaatgcattatatgcaatgagtgctgtgagggtgtttactttaggttgcgtattgtttgatcaagagagccaagtcgctaaagaagaaagggaaacacctactactgctagtatgccgccattattgcgacaaggttgggaattaaaggatcaccaaggtgcagagccagccttcttattcggccttgaattgatcatatgcggattagaaaaacaacttaaatgcgaaagtgggtcttaa

SEQ ID NO: 473 - DNA, 627 bp, Artificial sequence
  SuR L6-2F11 CDS
  misc_feature (193)..(193): n is a, c, g, or t
  misc_feature (328)..(328): n is a, c, g, or t
atgggatctagattagataaaagtaaagtgattaacagcgcattagagctgcttaatgaggtcggaatcgaaggtttaacaacccgtaaactcgcccagaagctaggtgtagagcagcctacattgtattggcatgtaaaaaataagcgagctctgctcgacgccttagccattgagatgatggataggcacncaactcactattgccctttagaaggggaaagctggcaagattttttacgtaataatgctaaaagtatgagatgtgctttactaagccatcgcgatggagcaaaagtatggttaggtacacgctggacagaacaantgtatgaaactgctgaaaatcaattagcctttttatgccaacaaggtttttcactagagaatgcattatatgcagtgagtgctgtgagggtgtttactttaggttgcgtattgtttgatcaagagctccaagtcgctaaagaagaaagggaaacacctactactgctagtatgccgccattattgcgacaaggtttggaattaaaggatcaccaaggtgcagagccagccttcttattcggccttgaattgatcatatgcggattagaaaaacaacttaaatgcgaaagtgggtcttaa

SEQ ID NO: 474 - DNA, 627 bp, Artificial sequence
  SuR L6-2F12 CDS
atgggatctagattagataaaagtaaagtgattaacagcgcattagagctgcttaatgaggtcggaatcgaaggtttaacaacccgtaaactcgcccagaagctaggtgtagagcagcctacattgtattggcatgtaaaaaataagcgagctctgctcgacgccttagccattgagatgatggataggcacgcaactcactattgccctttagaaggggaaagctggcaagattttttacgtaatactgctaaaagtatgagatgtgctttactaagccatcgcgatggagcaaaagtatgtttaggtacacgctggacagaacaacaatatgaaagtgctgaaaatatgttagcctttttatgccaacaaggtttttcactagagaatgcattatatgcaatgagtgctgtgagggtgtttactttaggttgcgtattgtttgatcaagagctccaagtcgctaaagaagaaagggaaacacctactactgctagtatgccgccattagtgcgacaaggttgggaattaaaggatcaccaaggtgcagagccagccttcttattcggccttgaattgatcatatgcggattagaaaaacaacttaaatgcgaaagtgggtcttaa

SEQ ID NO: 475 - DNA, 627 bp, Artificial sequence
  SuR L6-2G01 CDS
atgggatctagattagataaaagtaaagtgattaacagcgcattagagctgcttaatgaggtcggaatcgaaggtttaacaacccgtaaactcgcccagaagctaggtgtagagcagcctacattgtattggcatgtaaaaaataagcgagctctgctcgacgccttagccattgagatgatggataggcacgcaactcactattgccctttagaaggggaaagctggcaagattttttacgtaatactgctaaaagtatgagatgtgctttactaagccatcgcgatggagcaaaagtatgtttaggtacacgctggacagaacaacaatatgaaactgctgaaaatatgttagcctttttatgccaacaaggtttttcactagagaatgcattatatgcagtgagtgctgtgagggtgtttactttaggttgcgtattgtttgatcaagagctccaagtcgctaaagaagaaagggaaacacctactactgctagtatgccgccattagtgcgacaagcttgggaattaaaggatcaccaaggtgcagagccagccttcttattcggccttgaattgatcatatgcggattagaaaaacaacttaaatgcgaaagtgggtcttaa

SEQ ID NO: 476 - DNA, 627 bp, Artificial sequence
  SuR L6-2G02 CDS
  misc_feature (204)..(204): n is a, c, g, or t
  misc_feature (303)..(303): n is a, c, g, or t
  misc_feature (420)..(420): n is a, c, g, or t
atgggatctagattagataaaagtaaagtgattaacagcgcattagagctgcttaatgaggtcggaatcgaaggtttaacaacccgtaaactcgcccagaagctaggtgtagagcagcctacattgtattggcatgtaaaaaataagcgagctctgctcgacgccttagccattgagatgatggataggcacccaactcactantgccctttagaaggggaaagctggcaagattttttacgtaatamtgctaaaagtatgagatgtgctttactaagccatcgcgatggagcaaaagtatgnttaggtacacgctggacagaacaactgtatgaaactgctgaaaatatgttagcctttttatgccaacaaggtttttcactagagaatgcattatatgcaatgagtgctgtgagggtntttactttaggttgcgtattgtttgatcaagagagccaagtcgctaaagaagaaagggaaacacctactactgctagtatgccgccattaktgcgacaagtttgggaattaaaggatcaccaaggtgcagagccagccttcttattcggccttgaattgatcatatgcggattagaaaaacaacttaaatgcgaaagtgggtcttaa

SEQ ID NO: 477 - DNA, 627 bp, Artificial sequence
  SuR L6-2G03 CDS
  misc_feature (513)..(513): n is a, c, g, or t
atgggatctagattagataaaagtaaagtgattaacagcgcattagagctgcttaatgaggtcggaatcgaaggtttaacaacccgtaaactcgcccagaagctaggtgtagagcagcctacattgtattggcatgtaaaaaataagcgagctctgctcgacgccttagccattgagatgatggataggcacgcaactcactattgccctttagaaggggaaagctggcaagattttttacgtaataatgctaaaagtatgagatgtgctttactaagccatcgcgatggagcaaaagtatgtttaggtacacgctggacagaacaattgtatgaaactgctgaaaatcaattagcctttttatgccaacaaggtttttcactagagaatgcattatatgcagtgagtgctgtgagggtgtttactttaggttgcgtattgtttgatcaagagagccaagtcgctaaagaagaaagggaaacacctactactgctagtatgccgccattattncgacaaggttgggaattaaaggatcaccaaggtgcagagccagccttcttattcggccttgaattgatcatatgcggattagaaaaacaacttaaatgcgaaagtgggtcttaa

SEQ ID NO: 478 - DNA, 627 bp, Artificial sequence
  SuR L6-2G05 CDS
atgggatctagattagataaaagtaaagtgattaacagcgcattagagctgcttaatgaggtcggaatcgaaggtttaacaacccgtaaactcgcccagaagctaggtgtagagcagcctacattgtattggcatgtaaaaaataagcgagctctgctcgacgccttagccattgagatgatggataggcaccaaactcactattgccctttagaaggggaaagctggcaagattttttacgtaataatgctaaaagtatgagatgtgctttactaagccatcgcgatggagcaaaagtatgtttaggtacacgctggacagaacaacaatatgaagctgctgaaaatcaattagcctttttatgccaacaaggtttttcactagagaatgcattatatgcaatgagtgctgtgagggtgtttactttaggttgcgtattgtttgatcaagagctccaagtcgctaaagaagaaagggaaacacctactactgctagtatgccgccattagtgcgacaagcttgggaattaaaggatcaccaaggtgcagagccagccttcttattcggccttgaattgatcatatgcggattagaaaaacaacttaaatgcgaaagtgggtcttaa

SEQ ID NO: 479 - DNA, 627 bp, Artificial sequence
  SuR L6-2G10 CDS
atgggatctagattagataaaagtaaagtgattaacagcgcattagagctgcttaatgaggtcggaatcgaaggtttaacaacccgtaaactcgcccagaagctaggtgtagagcagcctacattgtattggcatgtaaaaaataagcgagctctgctcgacgccttagccattgagatgatggataggcaccaaactcactattgccctttagaaggggaaagctggcaagattttttacgtaatactgctaaaagtatgagatgtgctttactaagccatcgcgatggagcaaaagtatgtttaggtacacgctggacagaacaaatgtatgaaagtgctgaaaatatgttagcctttttatgccaacaaggtttttcactagagaatgcattatatgcagtgagtgctgtgagggtgtttactttaggttgcgtattgtttgatcaagagagccaagtcgctaaagaagaaagggaaacacctactactgctagtatgccgccattattgcgacaaggttgggaattaaaggatcaccaaggtgcagagccagccttcttattcggccttgaattgatcatatgcggattagaaaaacaacttaaatgcgaaagtgggtcttaa

SEQ ID NO: 480 - DNA, 627 bp, Artificial sequence
  SuR L6-2H01 CDS
atgggatctagattagataaaagtaaagtgattaacagcgcattagagctgcttaatgaggtcggaatcgaaggtttaacaacccgtaaactcgcccagaagctaggtgtagagcagcctacattgtattggcatgtaaaaaataagcgagctctgctcgacgccttagccattgagatgatggataggcaccaaactcactattgccctttagaaggggaaagctggcaagattttttacgtaataatgctaaaagtatgagatgtgctttactaagccatcgcgatggagcaaaagtatgtttaggtacacgctggacagaacaacaatatgaaagtgctgaaaatcaattagcctttttatgccaacaaggtttttcactagagaatgcattatatgcagtgagtgctgtgagggtgtttactttaggttgcgtattgtttgatcaagagagccaagtcgctaaagaagaaagggaaacacctactactgctagtatgccgccattagtgcgacaagcttgggaattaaaggatcaccaaggtgcagagccagccttcttattcggccttgaattgatcatatgcggattagaaaaacaacttaaatgcgaaagtgggtcttaa

SEQ ID NO: 481 - DNA, 627 bp, Artificial sequence
  SuR L6-2H02 CDS
atgggatctagattagataaaagtaaagtgattaacagcgcattagagctgcttaatgaggtcggaatcgaaggtttaacaacccgtaaactcgcccagaagctaggtgtagagcagcctacattgtattggcatgtaaaaaataagcgagctctgctcgacgccttagccattgagatgatggataggcaccaaactcactattgccctttagaaggggaaagctggcaagattttttacgtaataatgctaaaagtatgagatgtgctttactaagccatcgcgatggagcaaaagtatgtttaggtacacgctggacagaaaaattgtatgaaactgctgaaaatatgttagcctttttatgccaacaaggtttttcactagagaatgcattatatgcagtgagtgctgtgagggtgtttactttaggttgcgtattgtttgatcaagagagccaagtcgctaaagaagaaagggaaacacctactactgctagtatgccgccattattgcgacaagtttgggaattaaaggatcaccaaggtgcagagccagccttcttattcggccttgaattgatcatatgcggattagaaaaacaacttaaatgcgaaagtgggtcttaa

SEQ ID NO: 482 - DNA, 627 bp, Artificial sequence
  SuR L6-2H03 CDS
atgggatctagattagataaaagtaaagtgattaacagcgcattagagctgcttaatgaggtcggaatcgaaggtttaacaacccgtaaactcgcccagaagctaggtgtagagcagcctacattgtattggcatgtaaaaaataagcgagctctgctcgacgccttagccattgagatgatggataggcacgcaactcactattgccctttagaaggggaaagctggcaagattttttacgtaatactgctaaaagtatgagatgtgctttactaagccatcgcgatggagcaaaagtatgtttaggtacacgctggacagaacaaatgtatgaaactgctgaaaatatgttagcctttttatgccaacaaggtttttcactagagaatgcattatatgcaatgagtgctgtgagggtgtttactttaggttgcgtattgtttgatcaagagctccaagtcgctaaagaagaaagggaaacacctactactgctagtatgccgccattagtgcgacaaggttgggaattaaaggatcaccaaggtgcagagccagccttcttattcggccttgaattgatcatatgcggattagaaaaacaacttaaatgcgaaagtgggtcttaa

SEQ ID NO: 483 - DNA, 627 bp, Artificial sequence
  SuR L6-2H04 CDS
atgggatctagattagataaaagtaaagtgattaacagcgcattagagctgcttaatgaggtcggaatcgaaggtttaacaacccgtaaactcgcccagaagctaggtgtagagcagcctacattgtattggcatgtaaaaaataagcgagctctgctcgacgccttagccattgagatgatggataggcaccaaactcactattgccctttagaaggggaaagctggcaagattttttacgtaataatgctaaaagtatgagatgtgctttactaagccatcgcgatggagcaaaagtatgtttaggtacacgctggacagaacaaatgtatgaaactgctgaaaatcaattagcctttttatgccaacaaggtttttcactagagaatgcattatatgcaatgagtgctgtgagggtgtttactttaggttgcgtattgtttgatcaagagctccaagtcgctaaagaagaaagggaaacacctactactgctagtatgccgccattattgcgacaaggttgggaattaaaggatcaccaaggtgcagagccagccttcttattcggacttgaattgatcatatgcggattagaaaaacaacttaaatgcgaaagtgggtcttaa

SEQ ID NO: 484 - DNA, 627 bp, Artificial sequence
  SuR L6-2H06 CDS
atgggatctagattagataaaagtaaagtgattaacagcgcattagagctgcttaatgaggtcggaatcgaaggtttaacaacccgtaaactcgcccagaagctaggtgtagagcagcctacattgtattggcatgtaaaaaataagcgagctctgctcgacgccttagccattgagatgatggataggcacgcaactcactattgccctttagaaggggaaagctggcaagattttttacgtaatactgctaaaagtatgagatgtgctttactaagccatcgcgatggagcaaaagtatgtttaggtacacgctggacagaacaacaatatgaagctgctgaaaatcaattagcctttttatgccaacaaggtttttcactagagaatgcattatatgcagtgagtgctgtgagggtgtttactttaggttgcgtattgtttgatcaagagagccaagtcgctaaagaagaaagggaaacacctactactgctagtatgccgccattattgcgacaaggttgggaattaaaggatcaccaaggtgcagagccagccttcttattcggccttgaattgatcatatgcggattagaaaaacaacttaaatgcgaaagtgggtcttaa

SEQ ID NO: 485 - DNA, 627 bp, Artificial sequence
  SuR L6-2H07 CDS
atgggatctagattagataaaagtaaagtgattaacagcgcattagagctgcttaatgaggtcggaatcgaaggtttaacaacccgtaaactcgcccagaagctaggtgtagagcagcctacattgtattggcatgtaaaaaataagcgagctctgctcgacgccttagccattgagatgatggataggcaccaaactcactattgccctttagaaggggaaagctggcaagattttttacgtaatactgctaaaagtatgagatgtgctttactaagccatcgcgatggagcaaaagtatggttaggtacacgctggacagaacaacaatatgaaagtgctgaaaatatgttagcctttttatgccaacaaggtttttcactagagaatgcattatatgcagtgagtgctgtgagggtgtttactttaggttgcgtattgtttgatcaagagctccaagtcgctaaagaagaaagggaaacacctactactgctagtatgccgccattagtgcgacaagcttgggaattaaaggatcaccaaggtgcagagccagccttcttattcggccttgaattgatcatatgcggattagaaaaacaacttaaatgcgaaagtgggtcttaa

SEQ ID NO: 486 - DNA, 627 bp, Artificial sequence
  SuR L6-2H10 CDS
atgggatctagattagataaaagtaaagtgattaacagcgcattagagctgcttaatgaggtcggaatcgaaggtttaacaacccgtaaactcgcccagaagctaggtgtagagcagcctacattgtattggcatgtaaaaaataagcgagctctgctcgacgccttagccattgagatgatggataggcaccaaactcacatgtgccctttagaaggggaaagctggcaagattttttacgtaataatgctaaaagtatgagatgtgctttactaagccatcgcgatggagcaaaagtatgtttaggtacacgctggacagaaaaattgtatgaaactgctgaaaatcaattagcctttttatgccaacaaggtttttcactagagaatgcattatatgcagtgagtgctgtgagggtgtttactttaggttgcgtattgtttgatcaagagagccaagtcgctaaagaagaaagggaaacacctactactgctagtatgccgccattagtgcgacaagcttgggaattaaaggatcaccaaggtgcagagccagccttcttattcggccttgaattgatcatatgcggattagaaaaacaacttaaatgcgaaagtgggtcttaa

SEQ ID NO: 487 - DNA, 627 bp, Artificial sequence
  SuR  L6-2H11 CDS
atgggatctagattagataaaagtaaagtgattaacagcgcattagagctgcttaatgaggtcggaatcgaaggtttaacaacccgtaaactcgcccagaagctaggtgtagagcagcctacattgtattggcatgtaaaaaataagcgagctctgctcgacgccttagccattgagatgatggataggcaccaaactcactattgccctttagaaggggaaagctggcaagattttttacgtaatactgctaaaagtatgagatgtgctttactaagccatcgcgatggagcaaaagtatgtttaggtacacgctggacagaaaaacaatatgaaactgctgaaaatatgttagcctttttatgccaacaaggtttttcactagagaatgcattatatgcaatgagtgctgtgagggtgtttactttaggttgcgtattgtttgatcaagagagccaagtcgctaaagaagaaagggaaacacctactactgctagtatgccgccattagtgcgacaagtttgggaattaaaggatcaccaaggtgcagagccagccttcttattcggccttgaattgatcatatgcggattagaaaaacaacttaaatgcgaaagtgggtcttaa

SEQ ID NO: 488 - DNA, 627 bp, Artificial sequence
  SuR L6-3A01 CDS
atgggatctagattagataaaagtaaagtgattaacagcgcattagagctgcttaatgaggtcggaatcgaaggtttaacaacccgtaaactcgcccagaagctaggtgtagagcagcctacattgtattggcatgtaaaaaataagcgagctctgctcgacgccttagccattgagatgatggataggcaccaaactcacttttgccctttagaaggggaaagctggcaagattttttacgtaataatgctaaaagtatgagatgtgctttactaagccatcgcgatggagcaaaagtatgtttaggtacacgctggacagaacaacaatatgaaagtgctgaaaatcaattagcctttttatgccaacaaggtttttcactagagaatgcattatatgcagtgagtgctgtgagggtgtttactttaggttgcgtattgtttgatcaagagctccaagtcgctaaagaagaaagggaaacacctactactgctagtatgccgccattattgcgacaagctttggaattaaaggatcaccaaggtgcagagccagccttcttattcggccttgaattgatcatatgcggattagaaaaacaacttaaatgcgaaagtgggtcttaa

SEQ ID NO: 489 - DNA, 627 bp, Artificial sequence
  SuR L6-3A02 CDS
atgggatctagattagataaaagtaaagtgattaacagcgcattagagctgcttaatgaggtcggaatcgaaggtttaacaacccgtaaactcgcccagaagctaggtgtagagcagcctacattgtattggcatgtaaaaaataagcgagctctgctcgacgccttagccattgagatgatggataggcacgcaactcactattgccctttagaaggggaaagctggcaagattttttacgtaataatgctaaaagtatgagatgtgctttactaagccatcgcgatggagcaaaagtatgtttaggtacacgctggacagaaaaacaatatgaaagtgctgaaaatatgttagcctttttatgccaacaaggtttttcactagagaatgcattatatgcagtgagtgctgtgaggaactttactttaggttgcgtattgtttgatcaagagagccaagtcgctaaagaagaaagggaaacacctactactgctagtatgccgccattattgcgacaaggttgggaattaaaggatcaccaaggtgcagagccagccttcttattcggccttgaattgatcatatgcggattagaaaaacaacttaaatgcgaaagtgggtcttaa

SEQ ID NO: 490 - DNA, 627 bp, Artificial sequence
  SuR L6-3A03 CDS
atgggatctagattagataaaagtaaagtgattaacagcgcattagagctgcttaatgaggtcggaatcgaaggtttaacaacccgtaaactcgcccagaagctaggtgtagagcagcctacattgtattggcatgtaaaaaataagcgagctctgctcgacgccttagccattgagatgatggataggcacgcaactcacatgtgccctttagaaggggaaagctggcaagattttttacgtaataatgctaaaagtatgagatgtgctttactaagccatcgcgatggagcaaaagtatgtttaggtacacgctggacagaaaaacattatgaaagtgctgaaaatatgttagcctttttatgccaacaaggtttttcactagagaatgcattatatgcagtgagtgctgtgagggtgtttactttaggttgcgtattgtttgatcaagagctccaagtcgctaaagaagaaagggaaacacctactactgctagtatgccgccattagtgcgacaagtttgggaattaaaggatcaccaaggtgcagagccagccttcttattcggccttgaattgatcatatgcggattagaaaaacaacttaaatgcgaaagtgggtcttaa

SEQ ID NO: 491 - DNA, 627 bp, Artificial sequence
  SuR L6-3A06 CDS
  misc_feature (194)..(194): n is a, c, g, or t
  misc_feature (350)..(350): n is a, c, g, or t
atgggatctagattagataaaagtaaagtgattaacagcgcattagagctgcttaatgaggtcggaatcgaaggtttaacaacccgtaaactcgcccagaagctaggtgtagagcagcctacattgtattggcatgtaaaaaataagcgagctctgctcgacgccttagccattgagatgatggataggcaccnaactcacttgtgccctttagaaggggaaagctggcaagattttttacgtaatactgctaaaagtatgagatgtgctttactaagccatcgcgatggagcaaaagtatgtttaggtacacgctggacagaacaattgtatgaagctgctgaaaatcnrttagcctttttatgccaacaaggtttttcactagagaatgcattatatgcaatgagtgctgtgagggtgtttactttaggttgcgtattgtttgatcaagagagccaagtcgctaaagaagaaagggaaacacctactactgctagtatgccgccattagtgcgacaagtttgggaattaaaggatcaccaaggtgcagagccagccttcttattcggccttgaattgatcatatgcggattagaaaaacaacttaaatgcgaaagtgggtcttaa

SEQ ID NO: 492 - DNA, 627 bp, Artificial sequence
  SuR L6-3A11 CDS
atgggatctagattagataaaagtaaagtgattaacagcgcattagagctgcttaatgaggtcggaatcgaaggtttaacaacccgtaaactcgcccagaagctaggtgtagagcagcctacattgtattggcatgtaaaaaataagcgagctctgctcgacgccttagccattgagatgatggataggcaccaaactcactattgccctttagaaggggaaagctggcaagattttttacgtaataatgctaaaagtatgagatgtgctttactaagccatcgcgatggagcaaaagtatgtttaggtacacgctggacagaacaacattatgaaggtgctgaaaatatgttagcctttttatgccaacaaggtttttcactagagaatgcattatatgcagtgagtgctgtgagggtgtttactttaggttgcgtattgtttgatcaagagagccaagtcgctaaagaagaaagggaaacacctactactgctagtatgccgccattattgcgacaagtttgggaattaaaggatcaccaaggtgcagagccagccttcttattcggccttgaattgatcatatgcggattagaaaaacaacttaaatgcgaaagtgggtcttaa

SEQ ID NO: 493 - DNA, 627 bp, Artificial sequence
  SuR L6-3B08 CDS
atgggatctagattagataaaagtaaagtgattaacagcgcattagagctgcttaatgaggtcggaatcgaaggtttaacaacccgtaaactcgcccagaagctaggtgtagagcagcctacattgtattggcatgtaaaaaataagcgagctctgctcgacgccttagccattgagatgatggataggcacgcaactcacatttgccctttagaaggggaaagctggcaagattttttacgtaataatgctaaaagtatgagatgtgctttactaagccatcgcgatggagcaaaagtatgtttaggtacacgctggacagaacaattgtatgaaagtgctgaaaatatgttagcctttttatgccaacaaggtttttcactagagaatgcattatatgcagtgagtgctgtgagggtgtttactttaggttgcgtattgtttgatcaagagagccaagtcgctaaagaagaaagggaaacacctactactgctagtatgccgccattagtgcgacaagtttgggaattaaaggatcaccaaggtgcagagccagccttcttattcggccttgaattgatcatatgcggattagaaaaacaacttaaatgcgaaagtgggtcttaa

SEQ ID NO: 494 - DNA, 627 bp, Artificial sequence
  SuR L6-3B09 CDS
atgggatctagattagataaaagtaaagtgattaacagcgcattagagctgcttaatgaggtcggaatcgaaggtttaacaacccgtaaactcgcccagaagctaggtgtagagcagcctacattgtattggcatgtaaaaaataagcgagctctgctcgacgccttagccattgagatgatggataggcaccaaactcactattgccctttagaaggggaaagctggcaagattttttacgtaataatgctaaaagtatgagatgtgctttactaagccatcgcgatggagcaaaagtatgtttaggtacacgctggacagaaaaacaatatgaaactgctgaaaatcaattagcctttttatgccaacaaggtttttcactagagaatgcattatatgcaatgagtgctgtgaggaactttactttaggttgcgtattgtttgatcaagagagccaagtcgctaaagaagaaagggaaacacctactactgctagtatgccgccattattgcgacaaggttgggaattaaaggatcaccaaggtgcagagccagccttcttattcggccttgaattgatcatatgcggattagaaaaacaacttaaatgcgaaagtgggtcttaa

SEQ ID NO: 495 - DNA, 627 bp, Artificial sequence
  SuR L6-3C02 CDS
atgggatctagattagataaaagtaaagtgattaacagcgcattagagctgcttaatgaggtcggaatcgaaggtttaacaacccgtaaactcgcccagaagctaggtgtagagcagcctacattgtattggcatgtaaaaaataagcgagctctgctcgacgccttagccattgagatgatggataggcaccaaactcactattgccctttagaaggggaaagctggcaagattttttacgtaataatgctaaaagtatgagatgtgctttactaagccatcgcgatggagcaaaagtatgtttaggtacacgctggacagaacaacattatgaaactgctgaaaatatgttagcctttttatgccaacaaggtttttcactagagaatgcattatatgcaatgagtgctgtgagggtgtttactttaggttgcgtattgtttgatcaagagagccaagtcgctaaagaagaaagggaaacacctactactgctagtatgccgccattattgcgacaaggttgggaattaaaggatcaccaaggtgcagagccagccttcttattcggccttgaattgatcatatgcggattagaaaaacaacttaaatgcgaaagtgggtcttaa

SEQ ID NO: 496 - DNA, 627 bp, Artificial sequence
  SuR L6-3C04 CDS
  misc_feature (338)..(338): n is a, c, g, or t
  misc_feature (403)..(403): n is a, c, g, or t
atgggatctagattagataaaagtaaagtgattaacagcgcattagagctgcttaatgaggtcggaatcgaaggtttaacaacccgtaaactcgcccagaagctaggtgtagagcagcctacattgtattggcatgtaaaaaataagcgagctctgctcgacgccttagccattgagatgatggataggcacccaactcacttgtgccctttagaaggggaaagctggcaagattttttacgtaatactgctaaaagtatgagatgtgctttactaagccatcgcgatggagcaaaagtatgtttaggtacacgctggacagaacaacwrtatgaagntgctgaaaatcwrttagcctttttatgccaacaaggtttttcactagagaatgcattatatgcantgagtgctgtgagggwgtttactttaggttgcgtattgtttgatcaagagatccaagtcgctaaagaagaaagggaaacacctactactgctagtatgccgccattagtgcgacaagcttgggaattaaaggatcaccaaggtgcagagccagccttcttattcggccttgaattgatcatatgcggattagaaaaacaacttaaatgcgaaagtgggtcttaa

SEQ ID NO: 497 - DNA, 627 bp, Artificial sequence
  SuR L6-3C05 CDS
atgggatctagattagataaaagtaaagtgattaacagcgcattagagctgcttaatgaggtcggaatcgaaggtttaacaacccgtaaactcgcccagaagctaggtgtagagcagcctacattgtattggcatgtaaaaaataagcgagctctgctcgacgccttagccattgagatgatggataggcacgcaactcacatttgccctttagaaggggaaagctggcaagattttttacgtaataatgctaaaagtatgagatgtgctttactaagccatcgcgatggagcaaaagtatgtttaggtacacgctggacagaacaaatgtatgaaactgctgaaaatcaattagcctttttatgccaacaaggtttttcactagagaatgcattatatgcaatgagtgctgtgagggtgtttactttaggttgcgtattgtttgatcaagagctccaagtcgctaaagaagaaagggaaacacctactactgctagtatgccgccattattgcgacaagtttgggaattaaaggatcaccaaggtgcagagccagccttcttattcggccttgaattgatcatatgcggattagaaaaacaacttaaatgcgaaagtgggtcttaa

SEQ ID NO: 498 - DNA, 627 bp, Artificial sequence
  SuR L6-3C06 CDS
atgggatctagattagataaaagtaaagtgattaacagcgcattagagctgcttaatgaggtcggaatcgaaggtttaacaacccgtaaactcgcccagaagctaggtgtagagcagcctacattgtattggcatgtaaaaaataagcgagctctgctcgacgccttagccattgagatgatggataggcaccaaactcacatttgccctttagaaggggaaagctggcaagattttttacgtaataatgctaaaagtatgagatgtgctttactaagccatcgcgatggagcaaaagtatgtttaggtacacgctggacagaaaaacattatgaaactgctgaaaatatgttagcctttttatgccaacaaggtttttcactagagaatgcattatatgcaatgagtgctgtgagggtgtttactttaggttgcgtattgtttgatcaagagagccaagtcgctaaagaagaaagggaaacacctactactgctagtatgccgccattagtgcgacaagtttgggaattaaaggatcaccaaggtgcagagccagccttcttattcggccttgaattgatcatatgcggattagaaaaacaacttaaatgcgaaagtgggtcttaa

SEQ ID NO: 499 - DNA, 627 bp, Artificial sequence
  SuR L6-3D03 CDS
atgggatctagattagataaaagtaaagtgattaacagcgcattagagctgcttaatgaggtcggaatcgaaggtttaacaacccgtaaactcgcccagaagctaggtgtagagcagcctacattgtattggcatgtaaaaaataagcgagctctgctcgacgccttagccattgagatgatggataggcaccaaactcacgtttgccctttagaaggggaaagctggcaagattttttacgtaatactgctaaaagtatgagatgtgctttactaagccatcgcgatggagcaaaagtatgtttaggtacacgctggacagaacaattgtatgaaactgctgaaaatatgttagcctttttatgccaacaaggtttttcactagagaatgcattatatgcagtgagtgctgtgagggtgtttactttaggttgcgtattgtttgatcaagagagccaagtcgctaaagaagaaagggaaacacctactactgctaggatgccgccattattgcgacaaggttgggaattaaaggatcaccaaggtgcagagccagccttcttattcggccttgaattgatcatatgcggattagaaaaacaacttaaatgcgaaagtgggtcttaa

SEQ ID NO: 500 - DNA, 627 bp, Artificial sequence
  SuR L6-3D05 CDS
atgggatctagattagataaaagtaaagtgattaacagcgcattagagctgcttaatgaggtcggaatcgaaggtttaacaacccgtaaactcgcccagaagctaggtgtagagcagcctacattgtattggcatgtaaaaaataagcgagctctgctcgacgccttagccattgagatgatggataggcaccaaactcactattgccctttagaaggggaaagctggcaagattttttacgtaatactgctaaaagtatgagatgtgctttactaagccatcgcgatggagcaaaagtatgtttaggtacacgctggacagaacaattgtatgaaagtgctgaaaatatgttagcctttttatgccaacaaggtttttcactagagaatgcattatatgcaatgagtgctgtgagggtgtttactttaggttgcgtattgtttgatcaagagctccaagtcgctaaagaagaaagggaaacacctactactgctagtatgccgccattattgcgacaaggttgggaattaaaggatcaccaaggtgcagagccagccttcttattcggccttgaattgatcatatgcggattagaaaaacaacttaaatgcgaaagtgggtcttaa

SEQ ID NO: 501 - DNA, 627 bp, Artificial sequence
  SuR L6-3D09 CDS
atgggatctagattagataaaagtaaagtgattaacagcgcattagagctgcttaatgaggtcggaatcgaaggtttaacaacccgtaaactcgcccagaagctaggtgtagagcagcctacattgtattggcatgtaaaaaataagcgagctctgctcgacgccttagccattgagatgatggataggcaccaaactcactattgccctttagaaggggaaagctggcaagattttttacgtaatactgctaaaagtatgagatgtgctttactaagccatcgcgatggagcaaaagtatgtttaggtacacgctggacagaaaaacaatatgaaactgctgaaaatcaattagcctttttatgccaacaaggtttttcactagagaatgcattatatgcagtgagtgctgtgagggtgtttactttaggttgcgtattgtttgatcaagagagccaagtcgctaaagaagaaagggaaacacctactactgctagtatgccgccattagtgcgacaagtttgggaattaaaggatcaccaaggtgcagagccagccttcttattcggccttgaattgatcatatgcggattagaaaaacaacttaaatgcgaaagtgggtcttaa

SEQ ID NO: 502 - DNA, 627 bp, Artificial sequence
  SuR L6-3E08 CDS
atgggatctagattagataaaagtaaagtgattaacagcgcattagagctgcttaatgaggtcggaatcgaaggtttaacaacccgtaaactcgcccagaagctaggtgtagagcagcctacattgtattggcatgtaaaaaataagcgagctctgctcgacgccttagccattgagatgatggataggcacgcaactcactattgccctttagaaggggaaagctggcaagattttttacgtaataatgctaaaagtatgagatgtgctttactaagccatcgcgatggagcaaaagtatgtttaggtacacgctggacagaacaacattatgaaactgctgaaaatcaattagcctttttatgccaacaaggtttttcactagagaatgcattatatgcaatgagtgctgtgagggtgtttactttaggttgcgtattgtttgatcaagagagccaagtcgctaaagaagaaagggaaacacctactactgctagtatgccgccattagtgcgacaaggttgggaattaaaggatcaccaaggtgcagagccagccttcttattcggccttgaattgatcatatgcggattagaaaaacaacttaaatgcgaaagtgggtcttaa

SEQ ID NO: 503 - DNA, 627 bp, Artificial sequence
  SuR L6-3E09 CDS
atgggatctagattagataaaagtaaagtgattaacagcgcattagagctgcttaatgaggtcggaatcgaaggtttaacaacccgtaaactcgcccagaagctaggtgtagagcagcctacattgtattggcatgtaaaaaataagcgagctctgctcgacgccttagccattgagatgatggataggcaccaaactcactattgccctttagaaggggaaagctggcaagattttttacgtaataatgctaaaagtatgagatgtgctttactaagccatcgcgatggagcaaaagtatgtttaggtacacgctggacagaaaaacattatgaaactgctgaaaatcaattagcctttttatgccaacaaggtttttcactagagaatgcattatatgcaatgagtgctgtgagggtgtttactttaggttgcgtattgtttgatcaagagagccaagtcgctaaagaagaaagggaaacacctactactgctagtatgccgccattattgcgacaagcttgggaattaaaggatcaccaaggtgcagagccagccttcttattcggccttgaattgatcatatgcggattagaaaaacaacttaaatgcgaaagtgggtcttaa

SEQ ID NO: 504 - DNA, 627 bp, Artificial sequence
  SuR L6-3E10 CDS
atgggatctagattagataaaagtaaagtgattaacagcgcattagagctgcttaatgaggtcggaatcgaaggtttaacaacccgtaaactcgcccagaagctaggtgtagagcagcctacattgtattggcatgtaaaaaataagcgagctctgctcgacgccttagccattgagatgatggataggcaccaaactcactattgccctttagaaggggaaagctggcaagattttttacgtaataatgctaaaagtatgagatgtgctttactaagccatcgcgatggagcaaaagtatgtttaggtacacgctggacagaacaacattatgaagctgctgaaaatatgttagcctttttatgccaacaaggtttttcactagagaatgcattatatgcagtgagtgctgtgagggtgtttactttaggttgcgtattgtttgatcaagagagccaagtcgctaaagaagaaagggaaacacctactactgctagtatgccgccattattgcgacaagtttgggaattaaaggatcaccaaggtgcagagccagccttcttattcggccttgaattgatcatatgcggattagaaaaacaacttaaatgcgaaagtgggtcttaa

SEQ ID NO: 505 - DNA, 627 bp, Artificial sequence
  SuR L6-3F02 CDS
atgggatctagattagataaaagtaaagtgattaacagcgcattagagctgcttaatgaggtcggaatcgaaggtttaacaacccgtaaactcgcccagaagctaggtgtagagcagcctacattgtattggcatgtaaaaaataagcgagctctgctcgacgccttagccattgagatgatggataggcaccaaactcactattgccctttagaaggggaaagctggcaagattttttacgtaataatgctaaaagtatgagatgtgctttactaagccatcgcgatggagcaaaagtatgtttaggtacacgctggacagaacaaatgtatgaagctgctgaaaatcaattagcctttttatgccaacaaggtttttcactagagaatgcattatatgcagtgagtgctgtgagggtgtttactttaggttgcgtattgtttgatcaagagctccaagtcgctaaagaagaaagggaaacacctactactgctagtatgccgccattagtgcgacaagtttgggaattaaaggatcaccaaggtgcagagccagccttcttattcggccttgaattgatcatatgcggattagaaaaacaacttaaatgcgaaagtgggtcttaa

SEQ ID NO: 506 - DNA, 627 bp, Artificial sequence
  SuR L6-3F09 CDS
atgggatctagattagataaaagtaaagtgattaacagcgcattagagctgcttaatgaggtcggaatcgaaggtttaacaacccgtaaactcgcccagaagctaggtgtagagcagcctacattgtattggcatgtaaaaaataagcgagctctgctcgacgccttagccattgagatgatggataggcaccaaactcactattgccctttagaaggggaaagctggcaagattttttacgtaataatgctaaaagtatgagatgtgctttactaagccatcgcgatggagcaaaagtatgtttaggtacacgctggacagaaaaattgtatgaagctgctgaaaatatgttagcctttttatgccaacaaggtttttcactagagaatgcattatatgcagtgagtgctgtgagggtgtttactttaggttgcgtattgtttgatcaagagagccaagtcgctaaagaagaaagggaaacacctactactgctagtatgccgccattagtgcgacaagtttgggaattaaaggatcaccaaggtgcagagccagccttcttattcggccttgaattgatcatatgcggattagaaaaacaacttaaatgcgaaagtgggtcttaa

SEQ ID NO: 507 - DNA, 627 bp, Artificial sequence
  SuR L6-3F12 CDS
  misc_feature (418)..(419): n is a, c, g, or t
atgggatctagattagataaaagtaaagtgattaacagcgcattagagctgcttaatgaggtcggaatcgaaggtttaacaacccgtaaactcgcccagaagctaggtgtagagcagcctacattgtattggcatgtaaaaaataagcgagctctgctcgacgccttagccattgagatgatggataggcaccaaactcactattgccctttagaaggggaaagctggcaagattttttacgtaatactgctaaaagtatgagatgtgctttactaagccatcgcgatggagcaaaagtatgtttaggtacacgctggacagaacaaatgtatgaagctgctgaaaatatgttagcctttttatgccaacaaggtttttcactagagaatgcattatatgcaatgagtgctgtgaggnngtttactttaggttgcgtattgtttgatcaagagagccaagtcgctaaagaagaaagggaaacacctactactgctagtatgccgccattagtgcgacaagcttgggaattaaaggatcaccaaggtgcagagccagccttcttattcggccttgaattgatcatatgcggattagaaaaacaacttaaatgcgaaagtgggtcttaa

SEQ ID NO: 508 - DNA, 627 bp, Artificial sequence
  SuR L6-3G03 CDS
  misc_feature (219)..(219): n is a, c, g, or t
  misc_feature (337)..(337): n is a, c, g, or t
  misc_feature (418)..(418): n is a, c, g, or t
atgggatctagattagataaaagtaaagtgattaacagcgcattagagctgcttaatgaggtcggaatcgaaggtttaacaacccgtaaactcgcccagaagctaggtgtagagcagcctacattgtattggcatgtaaaaaataagcgagctctgctcgacgccttagccattgagatgatggataggcacgcaactcactattgccctttagaaggngaaagctggcaagattttttacgtaataatgctaaaagtatgagatgtgctttactaagccatcgcgatggagcaaaagtatgtttaggtacacgctggacagaacaactgtatgaanctgctgaaaatcaattagcctttttatgccaacaaggtttttcactagagaatgcattatatgcaatgagtgctgtgaggnwgtttactttaggttgcgtattgtttgatcaagagagccaagtcgctaaagaagaaagggaaacacctactactgctagtatgccgccattagtgcgacaaggttgggaattaaaggatcaccaaggtgcagagccagccttcttattcggccttgaattgatcatatgcggattagaaaaacaacttaaatgcgaaagtgggtcttaa

SEQ ID NO: 509 - DNA, 627 bp, Artificial sequence
  SuR L6-3G05 CDS
atgggatctagattagataaaagtaaagtgattaacagcgcattagagctgcttaatgaggtcggaatcgaaggtttaacaacccgtaaactcgcccagaagctaggtgtagagcagcctacattgtattggcatgtaaaaaataagcgagctctgctcgacgccttagccattgagatgatggataggcaccaaactcactattgccctttagaaggggaaagctggcaagattttttacgtaatactgctaaaagtatgagatgtgctttactaagccatcgcgatggagcaaaagtatgtttaggtacacgctggacagaaaaacaatatgaaagtgctgaaaatcaattagcctttttatgccaacaaggtttttcactagagaatgcattatatgcaatgagtgctgtgagggtgtttactttaggttgcgtattgtttgatcaagagagccaagtcgctaaagaagaaagggaaacacctactactgctagtatgccgccattagtgcgacaaggttgggaattaaaggatcaccaaggtgcagagccagccttcttattcggccttgaattgatcatatgcggattagaaaaacaacttaaatgcgaaagtgggtcttaa

SEQ ID NO: 510 - DNA, 627 bp, Artificial sequence
  SuR L6-3G09 CDS
atgggatctagattagataaaagtaaagtgattaacagcgcattagagctgcttaatgaggtcggaatcgaaggtttaacaacccgtaaactcgcccagaagctaggtgtagagcagcctacattgtattggcatgtaaaaaataagcgagctctgctcgacgccttagccattgagatgatggataggcaccaaactcactattgccctttagaaggggaaagctggcaagattttttacgtaataatgctaaaagtatgagatgtgctttactaagccatcgcgatggagcaaaagtatgtttaggtacacgctggacagaacaacattatgaagctgctgaaaatcaattagcctttttatgccaacaaggtttttcactagagaatgcattatatgcagtgagtgctgtgagggtgtttactttaggttgcgtattgtttgatcaagagagccaagtcgctaaagaagaaagggaaacacctactactgctagtatgccgccattagtgcgacaagtttgggaattaaaggatcaccaaggtgcagagccagccttcttattcggccttgaattgatcatatgcggattagaaaaacaacttaaatgcgaaagtgggtcttaa

SEQ ID NO: 511 - DNA, 627 bp, Artificial sequence
  SuR L6-3H02 CDS
atgggatctagattagataaaagtaaagtgattaacagcgcattagagctgcttaatgaggtcggaatcgaaggtttaacaacccgtaaactcgcccagaagctaggtgtagagcagcctacattgtattggcatgtaaaaaataagcgagctctgctcgacgccttagccattgagatgatggataggcacgcaactcactattgccctttagaaggggaaagctggcaagattttttacgtaatactgctaaaagtatgagatgtgctttactaagccatcgcgatggagcaaaagtatgtttaggtacacgctggacagaacaacattatgaaagtgctgaaaatatgttagcctttttatgccaacaaggtttttcactagagaatgcattatatgcagtgagtgctgtgagggtgtttactttaggttgcgtattgtttgatcaagagagccaagtcgctaaagaagaaagggaaacacctactactgctagtatgccgccattagtgcgacaagcttgggaattaaaggttcaccaaggtgcagagccagccttcttattcggccttgaattgatcatatgcggattagaaaaacaacttaaatgcgaaagtgggtcttaa

SEQ ID NO: 512 - DNA, 627 bp, Artificial sequence
  SuR L6-3H05 CDS
atgggatctagattagataaaagtaaagtgattaacagcgcattagagctgcttaatgaggtcggaatcgaaggtttaacaacccgtaaactcgcccagaagctaggtgtagagcagcctacattgtattggcatgtaaaaaataagcgagctctgctcgacgccttagccattgagatgatggataggcacgcaactcactattgccctttagaaggggaaagctggcaagattttttacgtaataatgctaaaagtatgagatgtgctttactaagccatcgcgatggagcaaaagtatgtttaggtacacgctggacagaacaacattatgaaagtgctgaaaatcaattagcctttttatgccaacaaggtttttcactagagaatgcattatatgcagtgagtgctgtgagggtgtttactttaggttgcgtattgtttgatcaagagctccaagtcgctaaagaagaaagggaaacacctactactgctagtatgccgccattattgcgacaagtttgggaattaaaggatcaccaaggtgcagagccagccttcttattcggccttgaattgatcatatgcggattagaaaaacaacttaaatgcgaaagtgggtcttaa

SEQ ID NO: 513 - DNA, 627 bp, Artificial sequence
  SuR L6-3H08 CDS
atgggatctagattagataaaagtaaagtgattaacagcgcattagagctgcttaatgaggtcggaatcgaaggtttaacaacccgtaaactcgcccagaagctaggtgtagagcagcctacattgtattggcatgtaaaaaataagcgagctctgctcgacgccttagccattgagatgatggataggcacgcaactcactattgccctttagaaggggaaagctggcaagattttttacgtaatactgctaaaagtatgagatgtgctttactaagccatcgcgatggagcaaaagtatgtttaggtacacgctggacagaaaaacaatatgaagctgctgaaaatcaattagcctttttatgccaacaaggtttttcactagagaatgcattatatgcagtgagtgctgtggggaactttactttaggttgcgtattgtttgatcaagagctccaagtcgctaaagaagaaagggaaacacctactactgctagtatgccgccattagtgcgacaagctttggaattaaaggatcaccaaggtgcagagccagccttcttattcggccttgaattgatcatatgcggattagaaaaacaacttaaatgcgaaagtgggtcttaa

SEQ ID NO: 514 - DNA, 627 bp, Artificial sequence
  SuR L6-4A01 CDS
atgggatctagattagataaaagtaaagtgattaacagcgcattagagctgcttaatgaggtcggaatcgaaggtttaacaacccgtaaactcgcccagaagctaggtgtagagcagcctacattgtattggcatgtaaaaaataagcgagctctgctcgacgccttagccattgagatgatggataggcacgcaactcactattgccctttagaaggggaaagctggcaagattttttacgtaatactgctaaaagtatgagatgtgctttactaagccatcgcgatggagcaaaagtatgtttaggtacacgctggacagaacaacaatatgaaactgctgaaaatcaattagcctttttatgccaacaaggtttttcactagagaatgcattatatgcaatgagtgctgtgaggaactttactttaggttgcgtattgtttgatcaagagagccaagtcgctaaagaagaaagggaaacacctactactgctagtatgccgccattattgcgacaagcttgggaattaaaggatcaccaaggtgcagagccagccttcttattcggccttgaattgatcatatgcggattagaaaaacaacttaaatgcgaaagtgggtcttaa

SEQ ID NO: 515 - DNA, 627 bp, Artificial sequence
  SuR L6-4A03 CDS
  misc_feature (200)..(200): n is a, c, g, or t
  misc_feature (314)..(314): n is a, c, g, or t
  misc_feature (368)..(368): n is a, c, g, or t
  misc_feature (413)..(413): n is a, c, g, or t
  misc_feature (437)..(437): n is a, c, g, or t
  misc_feature (458)..(458): n is a, c, g, or t
  misc_feature (542)..(542): n is a, c, g, or t
atgggatctagattagataaaagtaaagtgattaacagcgcattagagctgcttaatgaggtcggaatcgaaggtttaacaacccgtaaactcgcccagaagctaggtgtagagcagcctacattgtattggcatgtaaaaaataagcgagctctgctcgacgccttagccattgagatgatggataggcacgcaactcnctattgccctttagaaggggaaagctggcaagattttttacgtaataatgctaaaagtatgagatgtgctttactaagccatcgcgatggagcaaaagtatgtttaggtacacnctggacagaaaaacattatgaaactgctgaaaatcaattagcctttttatgccnacaaggtttttcactagagaatgcattatatgcaatgagtgctgngagggtgtttactttaggttgcgnattgtttgatcaagagctccnagtcgctaaagaagaaagggaaacacctactactgctagtatgccgccattattgcgacaaggttgggaattaaaggatcaccnaggtgcagagccagccttcttattcggccttgaattgatcatatgcggattagaaaaacaacttaaatgcgaaagtgggtcttaa

SEQ ID NO: 516 - DNA, 627 bp, Artificial sequence
  SuR L6-4A04 CDS
atgggatctagattagataaaagtaaagtgattaacagcgcattagagctgcttaatgaggtcggaatcgaaggtttaacaacccgtaaactcgcccagaagctaggtgtagagcagcctacattgtattggcatgtaaaaaataagcgagctctgctcgacgccttagccattgagatgatggataggcaccaaactcacttgtgccctttagaaggggaaagctggcaagattttttacgtaatactgctaaaagtatgagatgtgctttactaagccatcgcgatggagcaaaagtatgtttaggtacacsctggacagaaaaaatgtatgaaagtgctgaaaatatgttagcctttttatgccaacaaggtttttcactagagaatgcattatatgcagtgagtgctgtgagggtgtttactttaggttgcgtattgtttgatcaagagctccaagtcgctaaagaagaaagggaaacacctactactgctagtatgccgccattattgcgacaagtttgggaattaaaggatcaccaaggtgcagagccagccttcttattcggccttgaattgatcatatgcggattagaaaaacaacttaaatgcgaaagtgggtcttaa

SEQ ID NO: 517 - DNA, 627 bp, Artificial sequence
  SuR L6-4A09 CDS
atgggatctagattagataaaagtaaagtgattaacagcgcattagagctgcttaatgaggtcggaatcgaaggtttaacaacccgtaaactcgcccagaagctaggtgtagagcagcctacattgtattggcatgtaaaaaataagcgagctctgctcgacgccttagccattgagatgatggataggcaccaaactcacatgtgccctttagaaggggaaagctggcaagattttttacgtaataatgctaaaagtatgagatgtgctttactaagccatcgcgatggagcaaaagtatgtttaggtacacgctggacagaaaaaatgtatgaaagtgctgaaaatatgttagcctttttatgccaacaaggtttttcactagagaatgcattatatgcaatgagtgctgtgagggtgtttactttaggttgcgtattgtttgatcaagagagccaagtcgctaaagaagaaagggaaacacctactwctrctagtatgycgccattagtgcgacaagcttgggaattaaaggatcaccaaggtgcagagccagccttcttattcggccttgaattgatcatatgcggattagaaaaacaacttaaatgcgaaagtgggtcttaa

SEQ ID NO: 518 - DNA, 627 bp, Artificial Sequence
  SuR L6-4A10 CDS
atgggatctagattagataaaagtaaagtgattaacagcgcattagagctgcttaatgaggtcggaatcgaaggtttaacaacccgtaaactcgcccagaagctaggtgtagagcagcctacattgtattggcatgtaaaaaataagcgagctctgctcgacgccttagccattgagatgatggataggcacgcaactcacatttgccctttagaaggggaaagctggcaagattttttacgtaatactgctaaaagtatgagatgtgctttactaagccatcgcgatggagcaaaagtatgtttaggtacacgctggacagaacaacattatgaaagtgctgaaaatcaattagcctttttatgccaacaaggtttttcactagagaatgcattatatgcagtgagtgctgtgagggtgtttactttaggttgcgtattgtttgatcaagagagccaagtcgctaaagaagaaagggaaacacctactactgctagtatgccgccattattgcgacaagtttgggaattaaaggatcaccaaggtgcagagccagccttcttattcggccttgaattgatcatatgcggattagaaaaacaacttaaatgcgaaagtgggtcttaa

SEQ ID NO: 519 - DNA, 627 bp, Artificial sequence
  SuR L6-4A11 CDS
  misc_feature (303)..(303): n is a, c, g, or t
  misc_feature (329)..(330): n is a, c, g, or t
  misc_feature (512)..(512): n is a, c, g, or t
atgggatctagattagataaaagtaaagtgattaacagcgcattagagctgcttaatgaggtcggaatcgaaggtttaacaacccgtaaactcgcccagaagctaggtgtagagcagcctacattgtattggcatgtaaaaaataagcgagctctgctcgacgccttagccattgagatgatggataggcaccaaactcactattgccctttagaaggggaaagctggcaagattttttacgtaatactgctaaaagtatgagatgtgctttactaagccatcgcgatggagcaaaagtatgnttaggtacacgctggacagaaaaacnntatgaagstgctgaaaatcaattagcctttttatgccaacaaggtttttcactagagaatgcattatatgcaatsagtgctgtgagggtgtttactttaggttgcgtattgtttgatcaagagagccaagtcgctaaagaagaaagggaaacacctactactgctagtatgccgccattagnscgacaagkttgggaattaaaggatcaccaaggtgcagagccagccttcttattcggccttgaattgatcatatgcggattagaaaaacaacttaaatgcgaaagtgggtcttaa

SEQ ID NO: 520 - DNA, 627 bp, Artificial sequence
  SuR L6-4B05 CDS
  misc_feature (194)..(194): n is a, c, g, or t
  misc_feature (204)..(204): n is a, c, g, or t
  misc_feature (418)..(419): n is a, c, g, or t
  misc_feature (521)..(521): n is a, c, g, or t
atgggatctagattagataaaagtaaagtgattaacagcgcattagagctgcttaatgaggtcggaatcgaaggtttaacaacccgtaaactcgcccagaagctaggtgtagagcagcctacattgtattggcatgtaaaaaataagcgagctctgctcgacgccttagccattgagatgatggataggcaccnaactcactantgccctttagaaggggaaagctggcaagattttttacgtaatactgctaaaagtatgagatgtgctttactaagccatcgcgatggagcaaaagtatgtttaggtacacgctggacagaacaacattatgaagctgctgaaaatctgttagcctttttatgccaacaaggtttttcactagagaatgcattatatgcaatgagtgctgtgaggnngtttactttaggttgcgtattgtttgatcaagagctccaagtcgctaaagaagaaagggaaacacctactactgctagtatkccgccattagtgcgacaagnttgggaattaaaggatcaccaaggtgcagagccagccttcttattcggccttgaattgatcatatgcggattagaaaaacaacttaaatgcgaaagtgggtcttaa

SEQ ID NO: 521 - DNA, 627 bp, Artificial sequence
  SuR L6-4B06 CDS
atgggatctagattagataaaagtaaagtgattaacagcgcattagagctgcttaatgaggtcggaatcgaaggtttaacaacccgtaaactcgcccagaagctaggtgtagagcagcctacattgtattggcatgtaaaaaataagcgagctctgctcgacgccttagccattgagatgatggataggcacgcaactcacgtttgccctttagaaggggaaagctggcaagattttttacgtaataatgctaaaagtatgagatgtgctttactaagccatcgcgatggagcaaaagtatgtttaggtacacgctggacagaacaacaatatgaaactgctgaaaatatgttagcctttttatgccaacaaggtttttcactagagaatgcattatatgcagtgagtgctgtgaggaactttactttaggttgcgtattgtttgatcaagagagccaagtcgctaaagaagaaagggaaacacctactactgctagtatgccgccattattgcgacaaggttgggaattaaaggatcaccaaggtgcagagccagccttcttattcggccttgaattgatcatatgcggattagaaaaacaacttaaatgcgaaagtgggtcttaa

SEQ ID NO: 522 - DNA, 627 bp, Artificial sequence
  SuR L6-4B07 CDS
atgggatctagattagataaaagtaaagtgattaacagcgcattagagctgcttaatgaggtcggaatcgaaggtttaacaacccgtaaactcgcccagaagctaggtgtagagcagcctacattgtattggcatgtaaaaaataagcgagctctgctcgacgccttagccattgagatgatggataggcacgcaactcactattgccctttagaaggggaaagctggcaagattttttacgtaataatgctaaaagtatgagatgtgctttactaagccatcgcgatggagcaaaagtatgtttaggtacacgctggacagaacaacattatgaaactgctgaaaatatgttagcctttttatgccaacaaggtttttcactagagaatgcattatatgcagtgagtgctgtgaggaactttactttaggttgcgtattgtttgatcaagagctccaagtcgctaaagaagaaagggaaacacctactactgctagtatgccgccattagtgcgacaagcttgggaattaaaggatcaccaaggtgcagagccagccttcttattcggccttgaattgatcatatgcggattagaaaaacaacttaaatgcgaaagtgggtcttaa

SEQ ID NO: 523 - DNA, 627 bp, Artificial sequence
  SuR L6-4B08 CDS
atgggatctagattagataaaagtaaagtgattaacagcgcattagagctgcttaatgaggtcggaatcgaaggtttaacaacccgtaaactcgcccagaagctaggtgtagagcagcctacattgtattggcatgtaaaaaataagcgagctctgctcgacgccttagccattgagatgatggataggcaccaaactcacttttgccctttagaaggggaaagctggcaagattttttacgtaataatgctaaaagtatgagatgtgctttactaagccatcgcgatggagcaaaagtatgtttaggtacacgctggacagaacaaatgtatgaaactgctgaaaatatgttagcctttttatgccaacaaggtttttcactagagaatgcattatatgcaatgagtgctgtgagggtgtttactttaggttgcgtattgtttgatcaagagagccaagtcgctaaagaagaaagggaaacacctactactgctagtatgcccccattagtgcgacaaggttgggaattaaaggatcaccaaggtgcagagccagccttcttattcggccttgaattgatcatatgcggattagaaaaacaacttaaatgcgaaagtgggtcttaa

SEQ ID NO: 524 - DNA, 627 bp, Artificial sequence
  SuR L6-4B12 CDS
atgggatctagattagataaaagtaaagtgattaacagcgcattagagctgcttaatgaggtcggaatcgaaggtttaacaacccgtaaactcgcccagaagctaggtgtagagcagcctacattgtattggcatgtaaaaaataagcgagctctgctcgacgccttagccattgagatgatggataggcacgcaactgactattgccctttagaaggggaaagctggcaagattttttacgtaataatgctaaaagtatgagatgtgctttactaagccatcgcgatggagcaaaagtatgtttaggtacacgctggacagaaaaacaatatgaaactgctgaaaatatgttagcctttttatgccaacaaggtttttcactagagaatgcattatatgcagtgagtgctgtgagggtgtttactttaggttgcgtattgtttgatcaagagagccaagtcgctwaagaagaaagggaaacacctmctactgctagtatrccgccattagtgcgacaagtttgggaattaaaggatcaccaaggtgcagagccagccttcttattcggccttgaattgatcatatgcggattagaaaaacaacttaaatgcgaaagtgggtcttaa

SEQ ID NO: 525 - DNA, 627 bp, Artificial sequence
  SuR L6-4C01 CDS
atgggatctagattagataaaagtaaagtgattaacagcgcattagagctgcttaatgaggtcggaatcgaaggtttaacaacccgtaaactcgcccagaagctaggtgtagagcagcctacattgtattggcatgtaaaaaataagcgagctctgctcgacgccttagccattgagatgatggataggcaccaaactcactattgccctttagaaggggaaagctggcaagattttttacgtaataatgctaaaagtatgagatgtgctttactaagccatcgcgatggagcaaaagtatgtttaggtacacgctggacagaacaattgtatgaaactgctgaaaatcaattagcctttttatgccaacaaggtttttcactagagaatgcattatatgcaatgagtgctgtgagggtgtttactttaggttgcgtattgtttgatcaagagagccaagtcgctaaagaagaaagggaaacacctactactgctagtatgccgccattagtgcgacaagcttgggaattaaaggatcaccaaggtgcagagccagccttcttattcggccttgaattgatcatatgcggattagaaaaacaacttaaatgcgaaagtgggtcttaa

SEQ ID NO: 526 - DNA, 627 bp, Artificial sequence
  SuR L6-4C03 CDS
atgggatctagattagataaaagtaaagtgattaacagcgcattagagctgcttaatgaggtcggaatcgaaggtttaacaacccgtaaactcgcccagaagctaggtgtagagcagcctacattgtattggcatgtaaaaaataagcgagctctgctcgacgccttagccattgagatgatggataggcaccaaactcacgtgtgccctttagaaggggaaagctggcaagattttttacgtaataatgctaaaagtatgagatgtgctttactaagccatcgcgatggagcaaaagtatgtttaggtacacgctggacagaacaacattatgaagctgctgaaaatatgttagcctttttatgccaacaaggtttttcactagagaatgcattatatkcaatgagtgctgtgagggtgtttactttaggttgcgtattgtttgatcaagagctccaagtcgctaaagaagaaagggaaacacctactactgctagtatgccgccattagtgcgacaagcttgggaattaaaggatcaccaaggtgcagagccagccttcttattcggccttgaattgatcatatgcggattagaaaaacaacttaaatgcgaaagtgggtcttaa

SEQ ID NO: 527 - DNA, 627 bp, Artificial sequence
  SuR L6-4C04 CDS
atgggatctagattagataaaagtaaagtgattaacagcgcattagagctgcttaatgaggtcggaatcgaaggtttaacaacccgtaaactcgcccagaagctaggtgtagagcagcctacattgtattggcatgtaaaaaataagcgagctctgctcgacgccttagccattgagatgatggataggcaccaaactcacttttgccctttagaaggggaaagctggcaagattttttacgtaataatgctaaaagtatgagatgtgctttactaagccatcgcgatggagcaaaagtatgtttaggtacacgctggacagaacaacaatatgaaagtgctgaaaatcaattagcctttttatgccaacaaggtttttcactagagaatgcattatatgcaatgagtgctgtgagggtgtttactttaggttgcgtattgtttgatcaagagagccaagtcgctaaagaagaaagggaaacacctactactgctagtatgccgccattattgcgacaaggtttggaattaaaggatcaccaaggtgcagagccagccttcttattcggccttgaattgatcatatgcggattagaaaaacaacttaaatgcgaaagtgggtcttaa

SEQ ID NO: 528 - DNA, 627 bp, Artificial sequence
  SuR L6-4C07 CDS
atgggatctagattagataaaagtaaagtgattaacagcgcattagagctgcttaatgaggtcggaatcgaaggtttaacaacccgtaaactcgcccagaagctaggtgtagagcagcctacattgtattggcatgtaaaaaataagcgagctctgctcgacgccttagccattgagatgatggataggcaccaaactcacttgtgccctttagaaggggaaagctggcaagattttttacgtaataatgctaaaagtatgagatgtgctttactaagccatcgcgatggagcaaaagtatgtttaggtacacgctggacagaacaattgtatgaaactgctgaaaatatgttagcctttttatgccaacaaggtttttcactagagaatgcattatatgcaatgagtgctgtgagggtgtttactttaggttgcgtattgtttgatcaagagagccaagtcgctaaagaagaaagggaaacacctactactgctagtatgccgccattattgcgacaaggttgggaattaaaggatcaccaaggtgcagagccagccttcttattcggccttgaattgatcatatgcggattagaaaaacaacttaaatgcgaaagtgggtcttaa

SEQ ID NO: 529 - DNA, 627 bp, Artificial sequence
  SuR L6-4C08 CDS
atgggatctagattagataaaagtaaagtgattaacagcgcattagagctgcttaatgaggtcggaatcgaaggtttaacaacccgtaaactcgcccagaagctaggtgtagagcagcctacattgtattggcatgtaaaaaataagcgagctctgctcgacgccttagccattgagatgatggataggcaccaaactcactattgccctttagaaggggaaagctggcaagattttttacgtaatactgctaaaagtatgagatgtgctttactaagccatcgcgatggagcaaaagtatgtttaggtacacgctggacagaaaaattgtatgaaactgctgaaaatatgttagcctttttatgccaacaaggtttttcactagagaatgcattatatgcaatgagtgctgtgagggtgtttactttaggttgcgtattgtttgatcaagagagccaagtcgctaaagaagaaagggaaacacctactactgctagtatgccgccattattgcgacaagcttgggaattaaaggatcaccaaggtgcagagccagccttcttattcggccttgaattgatcatatgcggattagaaaaacaacttaaatgcgaaagtgggtcttaa

SEQ ID NO: 530 - DNA, 627 bp, Artificial sequence
  SuR L6-4C09 CDS
atgggatctagattagataaaagtaaagtgattaacagcgcattagagctgcttaatgaggtcggaatcgaaggtttaacaacccgtaaactcgcccagaagctaggtgtagagcagcctacattgtattggcatgtaaaaaataagcgagctctgctcgacgccttagccattgagatgatggataggcaccaaactcactattgccctttagaaggggaaagctggcaagattttttacgtaataatgctaaaagtatgagatgtgctttactaagccatcgcgatggagcaaaagtatgtttaggtacacgctggacagaaaaacaatatgaaactgctgaaaatatgttagcctttttatgccaacaaggtttttcactagagaatgcattatatgcaatgagtgctgtgagggtgtttactttaggttgcgtattgtttgatcaagagctccaagtcgctaaagaagaaagggaaacacctactactgctagtatgccgccattattgcgacaagtttgggaattaaaggatcaccaaggtgcagagccagccttcttattcggccttgaattgatcatatgcggattagaaaaacaacttaaatgcgaaagtgggtcktaa

SEQ ID NO: 531 - DNA, 627 bp, Artificial sequence
  SuR L6-4C10 CDS
atgggatctagattagataaaagtaaagtgattaacagcgcattagagctgcttaatgaggtcggaatcgaaggtttaacaacccgtaaactcgcccagaagctaggtgtagagcagcctacattgtattggcatgtaaaaaataagcgagctctgctcgacgccttagccattgagatgatggataggcaccaaactcactattgccctttagaaggggaaagctggcaagattttttacgtaatactgctaaaagtatgagatgtgctttactaagccatcgcgatggagcaaaagtatgtttaggtacacgctggacagaacaaatgtatgaaagtgctgaaaatcaattagcctttttatgccaacaaggtttttcactagagaatgcattatatgcagtgagtgctgtgagggtgtttactttaggttgcgtattgtttgatcaagagctccaagtcgctaaagaagaaagggaaacacctactactgctagtatgccgccattattgcgacaagcttgggaattaaaggatcaccaaggtgcagagccagccttcttattcggccttgaattgatcatatgcggattagaaaaacaacttaaatgcgaaagtgggtcttaa

SEQ ID NO: 532 - DNA, 627 bp, Artificial sequence
  SuR L6-4C11 CDS
atgggatctagattagataaaagtaaagtgattaacagcgcattagagctgcttaatgaggtcggaatcgaaggtttaacaacccgtaaactcgcccagaagctaggtgtagagcagcctacattgtattggcatgtaaaaaataagcgagctctgctcgacgccttagccattgagatgatggataggcaccaaactcactattgccctttagaaggggaaagctggcaagattttttacgtaatactgctaaaagtatgagatgtgctttactaagccatcgcgatggagcaaaagtatgtttaggtacacgctggacagaaaaacaatatgaaactgctgaaaatatgttagcctttttatgccaacaaggtttttcactagagaatgcattatatgcaatgagtgctgtgagggtgtttactttaggttgcgtattgtttgatcaagagagccaagtcgctaaagaagaaagggaaacacctactactgctagtatgccgccattattgcgacaaggttgggaattaaaggatcaccaaggtgcagagccagccttcttattcggccttgaattgatcatatgcggattagaaaaacaacttaaatgcgaaagtgggtcttaa

SEQ ID NO: 533 - DNA, 627 bp, Artificial sequence; identical to SEQ ID NO: 505
  SuR L6-4D09 CDS

SEQ ID NO: 534 - DNA, 627 bp, Artificial sequence
  SuR L6-4D10 CDS
atgggatctagattagataaaagtaaagtgattaacagcgcattagagctgcttaatgaggtcggaatcgaaggtttaacaacccgtaaactcgcccagaagctaggtgtagagcagcctacattgtattggcatgtaaaaaataagcgagctctgctcgacgccttagccattgagatgatggataggcaccaaactcactattgccctttagaaggggaaagctggcaagattttttacgtaataatgctaaaagtatgagatgtgctttactaagccatcgcgatggagcaaaagtatgtttaggtacacgctggacagaaaaacaatatgaaagtgctgaaaatatgttagcctttttatgccaacaaggtttttcactagagaatgcattatatgcagtgagtgctgtgagggtgtttactttaggttgcgtattgtttgatcaagagagccaagtcgctaaagaagaaagggaaacacctactactgctagtatgccgccattattgcgacaagcttgggaattaaaggatcaccaaggtgcagagccagccttcttattcggccttgaattgatcatatgcggattagaaaaacaacttaaatgcgaaagtgggtcttaa

SEQ ID NO: 535 - DNA, 627 bp, Artificial sequence
  SuR L6-4E01 CDS
atgggatctagattagataaaagtaaagtgattaacagcgcattagagctgcttaatgaggtcggaatcgaaggtttaacaacccgtaaactcgcccagaagctaggtgtagagcagcctacattgtattggcatgtaaaaaataagcgagctctgctcgacgccttagccattgagatgatggataggcaccaaactcacttgtgccctttagaaggggaaagctggcaagattttttacgtaataatgctaaaagtatgagatgtgctttactaagccatcgcgatggagcaaaagtatgtttaggtacacgctggacagaacaattgtatgaaagtgctgaaaatcaattagcctttttatgccaacaaggtttttcactagagaatgcattatatgcagtgagtgctgtgagggtgtttactttaggttgcgtattgtttgatcaagagagccaagtcgctaaagaagaaagggaaacacctactactgctagtatgccgccattattgcgacaagcttgggaattaaaggatcaccaaggtgcagagccagccttcttattcggccttgaattgatcatatgcggattagaaaaacaacttaaatgcgaaagtgggtcttaa

SEQ ID NO: 536 - DNA, 627 bp, Artificial sequence
  SuR L6-4E02 CDS
atgggatctagattagataaaagtaaagtgattaacagcgcattagagctgcttaatgaggtcggaatcgaaggtttaacaacccgtaaactcgcccagaagctaggtgtagagcagcctacattgtattggcatgtaaaaaataagcgagctctgctcgacgccttagccattgagatgatggataggcacgcaactcacttgtgccctttagaaggggaaagctggcaagattttttacgtaataatgctaaaagtatgagatgtgctttactaagccatcgcgatggagcaaaagtatgtttaggtacacgctggacagaaaaacaatatgaaactgctgaaaatatgttagcctttttatgccaacaaggtttttcactagagaatgcattatatgcagtgagtgctgtgagggtgtttactttaggttgcgtattgtttgatcaagagagccaagtcgctaaagaagaaagggaaacacctactactgctagtatgccgccattattgcgacaagtttgggaattaaaggatcaccaaggtgcagagccagccttcttattcggccttgaattgatcatatgcggattagaaaaacaacttaaatgcgaaagtgggtcttaa

SEQ ID NO: 537 - DNA, 627 bp, Artificial sequence
  SuR L6-4E03 CDS
atgggatctagattagataaaagtaaagtgattaacagcgcattagagctgcttaatgaggtcggaatcgaaggtttaacaacccgtaaactcgcccagaagctaggtgtagagcagcctacattgtattggcatgtaaaaaataagcgagctctgctcgacgccttagccattgagatgatggataggcacgcaactcacttttgccctttagaaggggaaagctggcaagattttttacgtaataatgctaaaagtatgagatgtgctttactaagccatcgcgatggagcaaaagtatgtgtaggtacacgctggacagaacaaatgtatgaagctgctgaaaatcaattagcctttttatgccaacaaggtttttcactagagaatgcattatatgcagtgagtgctgtgagggtgtttactttaggttgcgtattgtttgatcaagagctccaagtcgctaaagaagaaagggaaacacctactactrctagtatkccgccattagtgcgacaagcttgggaattaaaggatcaccaaggtgcagagccagccttcttattcggccttgaattgatcatatgcggattagaaaaacaacttaaatgcgaaagtgggtcttaa

SEQ ID NO: 538 - DNA, 627 bp, Artificial sequence
  SuR L6-4E05 CDS
atgggatctagattagataaaagtaaagtgattaacagcgcattagagctgcttaatgaggtcggaatcgaaggtttaacaacccgtaaactcgcccagaagctaggtgtagagcagcctacattgtattggcatgtaaaaaataagcgagctctgctcgacgccttagccattgagatgatggataggcaccaaactcacatttgccctttagaaggggaaagctggcaagattttttacgtaataatgctaaaagtatgagatgtgctttactaagccatcgcgatggagcaaaagtatgtgtaggtacacgctggacagaaaaacattatgaaagtgctgaaaatatgttagcctttttatgccaacaaggtttttcactagagaatgcattatatgcagtgagtgctgtgagggtgtttactttaggttgcgtattgtttgatcaagagagccaagtcgctaaagaagaaagggaaacacctactactgctagtatgccgccattattgcgacaagcttgggaattaaaggatcaccaaggtgcagagccagccttcttattcggccttgaattgatcatatgcggattagaaaaacaacttaaatgcgaaagtgggtcttaa

SEQ ID NO: 539 - DNA, 627 bp, Artificial sequence
  SuR L6-4E08 CDS
  misc_feature (303)..(303): n is a, c, g, or t
  misc_feature (349)..(349): n is a, c, g, or t
  misc_feature (418)..(418): n is a, c, g, or t
  misc_feature (454)..(454): n is a, c, g, or t
  misc_feature (524)..(524): n is a, c, g, or t
atgggatctagattagataaaagtaaagtgattaacagcgcattagagctgcttaatgaggtcggaatcgaaggtttaacaacccgtaaactcgcccagaagctaggtgtagagcagcctacattgtattggcatgtaaaaaataagcgagctctgctcgacgccttagccattgagatgatggataggcacgcaactcacttttgccctttagaaggggaaagctggcaagattttttacgtaataatgctaaaagtatgagatgtgctttactaagccatcgcgatggagcaaaagtatgnttaggtacacgctggacagaacaactgtatgaaactgctgaaaatntgttagcctttttatgccaacaaggtttttcactagagaatgcattatatgcaatgagtgctgtgaggnwctttactttaggttgcgtattgtttgatcaagagntccaagtcgctaaagaagaaagggaaacacctactactgctagtatgccgccattattgcgacaagtttnggaattaaaggatcaccaaggtgcagagccagccttcttattcggccttgaattgatcatatgcggattagaaaaacaacttaaatgcgaaagtgggtcttaa

SEQ ID NO: 540 - DNA, 627 bp, Artificial sequence
  SuR L6-4E09 CDS
atgggatctagattagataaaagtaaagtgattaacagcgcattagagctgcttaatgaggtcggaatcgaaggtttaacaacccgtaaactcgcccagaagctaggtgtagagcagcctacattgtattggcatgtaaaaaataagcgagctctgctcgacgccttagccattgagatgatggataggcacgcaactcacgtgtgccctttagaaggggaaagctggcaagattttttacgtaatactgctaaaagtatgagatgtgctttactaagccatcgcgatggagcaaaagtatgtttaggtacacgctggacagaacaacattatgaaactgctgaaaatatgttagcctttttatgccaacaaggtttttcactagagaatgcattatatgcaatgagtgctgtgagggtgtttactttaggttgcgtattgtttgatcaagagagccaagtcgctaaagaagaaagggaaacacctactactgctagtatgccgccattattgcgacaagtttgggaattaaaggatcaccaaggtgcagagccagccttcttattcggccttgaattgatcatatgcggattagaaaaacaacttaaatgcgaaagtgggtcttaa

SEQ ID NO: 541 - DNA, 627 bp, Artificial sequence
  SuR L6-4E11 CDS
  misc_feature (203)..(203): n is a, c, g, or t
  misc_feature (512)..(512): n is a, c, g, or t
atgggatctagattagataaaagtaaagtgattaacagcgcattagagctgcttaatgaggtcggaatcgaaggtttaacaacccgtaaactcgcccagaagctaggtgtagagcagcctacattgtattggcatgtaaaaaataagcgagctctgctcgacgccttagccattgagatgatggataggcacccaactcactnktgccctttagaaggggaaagctggcaagattttttacgtaatactgctaaaagtatgagatgtgctttactaagccatcgcgatggagcaaaagtatgtttaggtacacgctggacagaacaattgtatgaaactgctgaaaatatgttagcctttttatgccaacaaggtttttcactagagaatgcattatatgcaatgagtgctgtgaggaastttactttaggttgcgtattgtttgatcaagagatccaagtcgctaaagaagaaagggaaacacctactactgctagtatgcccccattagnccgacaagcttgggaattaaaggatcaccaaggtgcagagccagccttcttattcggccttgaattgatcatatgcggattagaaaaacaacttaaatgcgaaagtgggtcttaa

SEQ ID NO: 542 - DNA, 627 bp, Artificial sequence
  SuR L6-4E12 CDS
  misc_feature (454)..(454): n is a, c, g, or t
  misc_feature (511)..(511): n is a, c, g, or t
  misc_feature (521)..(521): n is a, c, g, or t
atgggatctagattagataaaagtaaagtgattaacagcgcattagagctgcttaatgaggtcggaatcgaaggtttaacaacccgtaaactcgcccagaagctaggtgtagagcagcctacattgtattggcatgtaaaaaataagcgagctctgctcgacgccttagccattgagatgatggataggcacgcaactcactattgccctttagaaggggaaagctggcaagattttttacgtaatactgctaaaagtatgagatgtgctttactaagccatcgcgatggagcaaaagtatgtttaggtacacgctggacagaaaaactgtatgaaactgctgaaaatatgttagcctttttatgccaacaaggtttttcactagagaatgcattatatgcasysagtgctgtgagggtgtttactttaggttgcgtattgtttgatcaagagntccaagtcgctaaagaagaaagggaaacacctactactgctagtatgccgccattancccgacaagnttgggaattaaaggatcaccaaggtgcagagccagccttcttattcggccttgaattgatcatatgcggattagaaaaacaacttaaatgcgaaagtgggtcttaa

SEQ ID NO: 543 - DNA, 627 bp, Artificial sequence
  SuR L6-4F01 CDS
atgggatctagattagataaaagtaaagtgattaacagcgcattagagctgcttaatgaggtcggaatcgaaggtttaacaacccgtaaactcgcccagaagctaggtgtagagcagcctacattgtattggcatgtaaaaaataagcgagctctgctcgacgccttagccattgagatgatggataggcacgcaactcacttgtgccctttagaaggggaaagctggcaagattttttacgtaatactgctaaaagtatgagatgtgctttactaagccatcgcgatggagcaaaagtatgtttaggtacacgctggacagaacaattgtatgaaactgctgaaaatatgttagcctttttatgccaacaaggtttttcactagagaatgcattatatgcagtgagtgctgtgagggtgtttactttaggttgcgtattgtttgatcaagasctccaagtcgctaaagaagaaagggaaacacctactwctgctagtatgycgccattagtgcgacaaggttgggaattaaaggatcaccaaggtgcagagccagccttcttattcggccttgaattgatcatatgcggattagaaaaacaacttaaatgcgaaagtgggtcttaa

SEQ ID NO: 544 - DNA, 627 bp, Artificial sequence
  SuR L6-4F10 CDS
  misc_feature (454)..(454): n is a, c, g, or t
atgggatctagattagataaaagtaaagtgattaacagcgcattagagctgcttaatgaggtcggaatcgaaggtttaacaacccgtaaactcgcccagaagctaggtgtagagcagcctacattgtattggcatgtaaaaaataagcgagctctgctcgacgccttagccattgagatgatggataggcaccaaactcactattgccctttagaaggggaaagctggcaagattttttacgtaataatgctaaaagtatgagatgtgctttactaagccatcgcgatggagcaaaagtatggttaggtacacgctggacagaacaactgtatgaagctgctgaaaatctgttagcctttttatgccaacaaggtttttcactagagaatgcattatatgcagtgagtgctgtgaggawctttactttaggttgcgtattgtttgatcaagagntccaagtcgctaaagaagaaagggaaacacctactactgctagtatgccgccattattgcgacaagcttgggaattaaaggatcaccaaggtgcagagccagccttcttattcggccttgaattgatcatatgcggattagaaaaacaacttaaatgcgaaagtgggtcttaa

SEQ ID NO: 545 - DNA, 627 bp, Artificial sequence
  SuR L6-4F12 CDS
atgggatctagattagataaaagtaaagtgattaacagcgcattagagctgcttaatgaggtcggaatcgaaggtttaacaacccgtaaactcgcccagaagctaggtgtagagcagcctacattgtattggcatgtaaaaaataagcgagctctgctcgacgccttagccattgagatgatggataggcaccaaactcactattgccctttagaaggggaaagctggcaagattttttacgtaataatgctaaaagtatgagatgtgctttactaagcaatcgcgatggagcaaaagtatgtttaggtacacgctggacagaaaaattgtatgaagctgctgaaaatcaattagcctttttatgccaacaaggtttttcactagagaatgcattatatgcagtgagtgctgtgagggtgtttactttaggttgcgtattgtttgatcaagagctccaagtcgctaaagaagaaagggaaacacctactactgctagtatkccgccattagtgcgacaagcttgggaattaaaggatcaccaaggtgcagagccagccttcttattcggccttgaattgatcatatgcggattagaaaaacaacttaaatgcgaaagtgggtcttaa

SEQ ID NO: 546 - DNA, 627 bp, Artificial sequence
  SuR L6-4G02 CDS
atgggatctagattagataaaagtaaagtgattaacagcgcattagagctgcttaatgaggtcggaatcgaaggtttaacaacccgtaaactcgcccagaagctaggtgtagagcagcctacattgtattggcatgtaaaaaataagcgagctctgctcgacgccttagccattgagatgatggataggcacgcaactcactattgccctttagaaggggaaagctggcaagattttttacgtaatactgctaaaagtatgagatgtgctttactaagccatcgcgatggagcaaaagtatgtttaggtacacgctggacagaacaattgtatgaaactgctgaaaatcaattagcctttttatgccaacaaggtttttcactagagaatgcattatatgcagtgagtgctgtgagggtgtttactttaggttgcgtattgtttgatcaagagctccaagtcgctaaagaagaaagggaaacacctactactgctagtatgccgccattattgcgacaagcttgggaattaaaggatcaccaaggtgcagagccagccttcttattcggccttgaattgatcatatgcggattagaaaaacaacttaaatgcgaaagtgggtcttaa

SEQ ID NO: 547 - DNA, 627 bp, Artificial sequence
  SuR L6-4G03 CDS
atgggatctagattagataaaagtaaagtgattaacagcgcattagagctgcttaatgaggtcggaatcgaaggtttaacaacccgtaaactcgcccagaagctaggtgtagagcagcctacattgtattggcatgtaaaaaataagcgagctctgctcgacgccttagccattgagatgatggataggcaccaaactcactattgccctttagaaggggaaagctggcaagattttttacgtaataatgctaaaagtatgagatgtgctttactaagccatcgcgatggagcaaaagtatgtttaggtacacgctggacagaaaaacattatgaaggtgctgaaaatcaattagcctttttatgccaacaaggtttttcactagagaatgcattatatgcaatgagtgctgtgagggtgtttactttaggttgcgtattgtttgatcaagagagccaagtcgctaaagaagaaagggaaacacctactactgctagtatgccgccattagtgcgacaagtttgggaattaaaggatcaccaaggtgcagagccagccttcttattcggccttgaattgatcatatgcggattagaaaaacaacttaaatgcgaaagtgggtcttaa

SEQ ID NO: 548 - DNA, 627 bp, Artificial sequence
  SuR L6-4G06 CDS
atgggatctagattagataaaagtaaagtgattaacagcgcattagagctgcttaatgaggtcggaatcgaaggtttaacaacccgtaaactcgcccagaagctaggtgtagagcagcctacattgtattggcatgtaaaaaataagcgagctctgctcgacgccttagccattgagatgatggataggcaccaaactcacatgtgccctttagaaggggaaagctggcaagattttttacgtaataatgctaaaagtatgagatgtgctttactaagccatcgcgatggagcaaaagtatgtttaggtacacgctggacagaaaaacattatgaaactgctgaaaatcaattagcctttttatgccaacaaggtttttcactagagaatgcattatatgcagtgagtgctgtgagggtgtttactttaggttgcgtattgtttgatcaagagctccaagtcgctaaagaagaaagggaaacacctactactgctagtatgccgccattagtgcgacaagcttgggaattaaaggatcaccaaggtgcagagccagccttcttattcggccttgaattgatcatatgcggattagaaaaacaacttaaatgcgaaagtgggtcttaa

SEQ ID NO: 549 - DNA, 627 bp, Artificial sequence
  SuR L6-4G07 CDS
atgggatctagattagataaaagtaaagtgattaacagcgcattagagctgcttaatgaggtcggaatcgaaggtttaacaacccgtaaactcgcccagaagctaggtgtagagcagcctacattgtattggcatgtaaaaaataagcgagctctgctcgacgccttagccattgagatgatggataggcacgcaactcacttgtgccctttagaaggggaaagctggcaagattttttacgtaataatgctaaaagtatgagatgtgctttactaagccatcgcgatggagcaaaagtatgtttaggtacacgctggacagaacaacaatatgaaactgctgaaaatatgttagcctttttatgccaacaaggtttttcactagagaatgcattatatgcagtgagtgctgtgaggaactttactttaggttgcgtattgtttgatcaagagagccaagtcgctaaagaagaaagggaaacacctactactgctagtatgccgccattattgcgacaagcttgggaattaaaggatcaccaaggtgcagagccagccttcttattgggccttgaattgatcatatgcggattagaaaaacaacttaaatgcgaaagtgggtcttaa

SEQ ID NO: 550 - DNA, 627 bp, Artificial sequence
  SuR L6-4G08 CDS
atgggatctagattagataaaagtaaagtgattaacagcgcattagagctgcttaatgaggtcggaatcgaaggtttaacaacccgtaaactcgcccagaagctaggtgtagagcagcctacattgtattggcatgtaaaaaataagcgagctctgctcgacgccttagccattgagatgatggataggcacccaactcactattgccctttagaaggggaaagctggcaagattttttacgtaataatgctaaaagtatgagatgtgctttactaagccatcgcgatggagcaaaagtatgtttaggtacacgctggacagaacaacaatatgaaactgctgaaaatcaattagcctttttatgccaacaaggtttttcactagagaatgcattatatgcaatgagtgctgtgaggaactttactttaggttgcgtattgtttgatcaagagakccaagtcgctaaagaagaaagggaaacacctactactgctagtatgccgccattattgcgacaagcttgggaattaaaggatcaccaaggtgcagagccagccttcttattcggccttgaattgatcatatgcggattagaaaaacaacttaaatgcgaaagtgggtcttaa

SEQ ID NO: 551 - DNA, 627 bp, Artificial sequence
  SuR L6-4G10 CDS
atgggatctagattagataaaagtaaagtgattaacagcgcattagagctgcttaatgaggtcggaatcgaaggtttaacaacccgtaaactcgcccagaagctaggtgtagagcagcctacattgtattggcatgtaaaaaataagcgagctctgctcgacgccttagccattgagatgatggataggcaccaaactcacttttgccctttagaaggggaaagctggcaagattttttacgtaatactgctaaaagtatgagatgtgctttactaagccatcgcgatggagcaaaagtatgtttaggtacacgctggacagaacaacaatatgaaactgctgaaaatatgttagcctttttatgccaacaaggtttttcactagagaatgcattatatgcagtgagtgctgtgagggtgtttactttaggttgcgtattgtttgatcaagagagccaagtcgctaaagaagaaagggaaacacctactactgctagtatgccgccattagcccgacaagcttgggaattaaaggatcaccaaggtgcagagccagccttcttattcggccttgaattgatcatatgcggattagaaaaacaacttaaatgcgaaagtgggtcttaa

SEQ ID NO: 552 - DNA, 627 bp, Artificial sequence
  SuR L6-4H07 CDS
atgggatctagattagataaaagtaaagtgattaacagcgcattagagctgcttaatgaggtcggaatcgaaggtttaacaacccgtaaactcgcccagaagctaggtgtagagcagcctacattgtattggcatgtaaaaaataagcgagctctgctcgacgccttagccattgagatgatggataggcaccaaactcacgtgtgccctttagaaggggaaagctggcaagattttttacgtaataatgctaaaagtatgagatgtgctttactaagccatcgcgatggagcaaaagtatgtttaggtacacgctggacagaacaaatgtatgaaactgctgaaaatcaattagcctttttatgccaacaaggtttttcactagagaatgcattatatgcagtgagtgctgtgagggtgtttactttaggttgcgtattgtttgatcaagagagccaagtcgctaaagaagaaagggaaacacctactactgctagtatgccgccattattgcgacaagcttgggaattaaaggatcaccaaggtgcagagccagccttcttattcggccttgaattgatcatatgcggattagaaaaacaacttaaatgcgaaagtgggtcttaa

SEQ ID NO: 553 - DNA, 627 bp, Artificial sequence
  SuR L6-5A02 CDS
atgggatctagattagataaaagtaaagtgattaacagcgcattagagctgcttaatgaggtcggaatcgaaggtttaacaacccgtaaactcgcccagaagctaggtgtagagcagcctacattgtattggcatgtaaaaaataagcgagctctgctcgacgccttagccattgagatgatggataggcacgcaactcactattgccctttagaaggggaaagctggcaagattttttacgtaatactgctaaaagtatgagatgtgctttactaagccatcgcgatggagcaaaagtatgtttaggtacacgctggacagaacaattgtatgaaactgctgaaaatcaattagcctttttatgccaacaaggtttttcactagagaatgcattatatgcaatgagtgctgtgagggtgtttactttaggttgcgtattgtttgatcaagagagccaagtcgctaaagaagaaagggaaacacctactactgctagtatgccgccattattgcgacaagcttgggaattaaaggatcaccaaggtgcagagccagccttcttattcggccttgaattgatcatatgcggattagaaaaacaacttaaatgcgaaagtgggtcttaa

SEQ ID NO: 554 - DNA, 627 bp, Artificial sequence
  SuR L6-5A03 CDS
atgggatctagattagataaaagtaaagtgattaacagcgcattagagctgcttaatgaggtcggaatcgaaggtttaacaacccgtaaactcgcccagaagctaggtgtagagcagcctacattgtattggcatgtaaaaaataagcgagctctgctcgacgccttagccattgagatgatggataggcacgcaactcactattgccctttagaaggggaaagctggcaagattttttacgtaataatgctaaaagtatgagatgtgctttactaagccatcgcgatggagcaaaagtatgtttaggtacacgctggacagaacaattgtatgaaactgctgaaaatatgttagcctttttatgccaacaaggtttttcactagagaatgcattatatgcaatgagtgctgtgagggtgtttactttaggttgcgtattgtttgatcaagagagccaagtcgctaaagaagaaagggaaacacctactactgctagtatgccgccattagtgcgacaaggttgggaattaaaggatcaccaaggtgcagagccagccttcttattcggccttgaattgatcatatgcggattagaaaaacaacttaaatgcgaaagtgggtcttaa

SEQ ID NO: 555 - DNA, 627 bp, Artificial sequence
  SuR L6-5A04 CDS
atgggatctagattagataaaagtaaagtgattaacagcgcattagagctgcttaatgaggtcggaatcgaaggtttaacaacccgtaaactcgcccagaagctaggtgtagagcagcctacattgtattggcatgtaaaaaataagcgagctctgctcgacgccttagccattgagatgatggataggcaccaaactcactattgccctttagaaggggaaagctggcaagattttttacgtaataatgctaaaagtatgagatgtgctttactaagccatcgcgatggagcaaaagtatggttaggtacacgctggacagaaaaacaatatgaaagtgctgaaaatatgttagcctttttatgccaacaaggtttttcactagagaatgcattatatgcagtgagtgctgtgagggtgtttactttaggttgcgtattgtttgatcaagagctccaagtcgctaaagaagaaagggaaacacctactactgctagtatgccgccattagtgcgacaagcttgggaattaaaggatcaccaaggtgcagagccagccttcttattcggccttgaattgatcatatgcggattagaaaaacaacttaaatgcgaaagtgggtcttaa

SEQ ID NO: 556 - DNA, 627 bp, Artificial sequence
  SuR L6-5A05 CDS
atgggatctagattagataaaagtaaagtgattaacagcgcattagagctgcttaatgaggtcggaatcgaaggtttaacaacccgtaaactcgcccagaagctaggtgtagagcagcctacattgtattggcatgtaaaaaataagcgagctctgctcgacgccttagccattgagatgatggataggcaccaaactcacatgtgccctttagaaggggaaagctggcaagattttttacgtaatactgctaaaagtatgagatgtgctttactaagccatcgcgatggagcaaaagtatgtttaggtacacgctggacagaacaaatgtatgaagctgctgaaaatcaattagcctttttatgccaacaaggtttttcactagagaatgcattatatgcaatgagtgctgtgagggtgtttactttaggttgcgtattgtttgatcaagagagccaagtcgctaaagaagaaagggaaacacctactactgctagtatgccgccattagtgcgacaagtttgggaattaaaggatcaccaaggtgcagagccagccttcttattcggccttgaattgatcatatgcggattagaaaaacaacttaaatgcgaaagtgggtcttaa

SEQ ID NO: 557 - DNA, 627 bp, Artificial sequence
  SuR L6-5A06 CDS
atgggatctagattagataaaagtaaagtgattaacagcgcattagagctgcttaatgaggtcggaatcgaaggtttaacaacccgtaaactcgcccagaagctaggtgtagagcagcctacattgtattggcatgtaaaaaataagcgagctctgctcgacgccttagccattgagatgatggataggcaccaaactcactattgccctttagaaggggaaagctggcaagattttttacgtaatactgctaaaagtatgagatgtgctttactaagccatcgcgatggagcaaaagtatgtttaggtacacgctggacagaacaaatgtatgaaactgctgaaaatcaattagcctttttatgccaacaaggtttttcactagagaatgcattatatgcaatgagtgctgtgagggtgtttactttaggttgcgtattgtttgatcaagagagccaagtcgctaaagaagaaagggaaacacctactactgctagtatgccgccattattgcgacaagtttgggaattaaaggatcaccaaggtgcagagccagccttcttattcggccttgaattgatcatatgcggattagaaaaacaacttaaatgcgaaagtgggtcttaa

SEQ ID NO: 558 - DNA, 627 bp, Artificial sequence
  SuR L6-5A07 CDS
  misc_feature (325)..(325): n is a, c, g, or t
  misc_feature (338)..(338): n is a, c, g, or t
  misc_feature (513)..(513): n is a, c, g, or t
atgggatctagattagataaaagtaaagtgattaacagcgcattagagctgcttaatgaggtcggaatcgaaggtttaacaacccgtaaactcgcccagaagctaggtgtagagcagcctacattgtattggcatgtaaaaaataagcgagctctgctcgacgccttagccattgagatgatggataggcaccaaactcacatttgccctttagaaggggaaagctggcaagattttttacgtaatactgctaaaagtatgagatgtgctttactaagccatcgcgatggagcaaaagtatgtttaggtacacgctggacagaanaacartatgaaantgctgaaaatatgttagcctttttatgccaacaaggtttttcactagagaatgcattatatgcaatgagtgctgtgagggtgtttactttaggttgcgtattgtttgatcaagagctccaagtcgctaaagaagaaagggaaacacctactactgctagtatgccgccattagtncgacaagtttgggaattaaaggatcaccaaggtgcagagccagccttcttattcggccttgaattgatcatatgcggattagaaaaacaacttaaatgcgaaagtgggtcttaa

SEQ ID NO: 559 - DNA, 627 bp, Artificial sequence
  SuR L6-5A09 CDS
atgggatctagattagataaaagtaaagtgattaacagcgcattagagctgcttaatgaggtcggaatcgaaggtttaacaacccgtaaactcgcccagaagctaggtgtagagcagcctacattgtattggcatgtaaaaaataagcgagctctgctcgacgccttagccattgagatgatggataggcaccaaactcacatgtgccctttagaaggggaaagctggcaagattttttacgtaataatgctaaaagtatgagatgtgctttactaagccatcgcgatggagcaaaagtatgtttaggtacacgctggacagaacaacattatgaagctgctgaaaatcaattagcctttttatgccaacaaggtttttcactagagaatgcattatatgcaatgagtgctgtgagggtgtttactttaggttgcgtattgtttgatcaagagagccaagtcgctaaagaagaaagggaaacacctactactgctagtatgccgccattagtgcgacaagcttgggaattaaaggatcaccaaggtgcagagccagccttcttattcggccttgaattgatcatatgcggattagaaaaacaacttaaatgcgaaagtgggtcttaa

SEQ ID NO: 560 - DNA, 627 bp, Artificial sequence
  SuR L6-5A10 CDS
  misc_feature (403)..(403): n is a, c, g, or t
  misc_feature (420)..(420): n is a, c, g, or t
  misc_feature (513)..(513): n is a, c, g, or t
atgggatctagattagataaaagtaaagtgattaacagcgcattagagctgcttaatgaggtcggaatcgaaggtttaacaacccgtaaactcgcccagaagctaggtgtagagcagcctacattgtattggcatgtaaaaaataagcgagctctgctcgacgccttagccattgagatgatggataggcacgcaactcactattgccctttagaaggggaaagctggcaagattttttacgtaatactgctaaaagtatgagatgtgctttactaagccatcgcgatggagcaaaagtatgtttaggtacacgctggacagaacaacattatgaaactgctgaaaatcaattagcctttttatgccaacaaggtttttcactagagaatgcattatatgcantgagtgctgtgagggtntttactttaggttgcgtattgtttgatcaagagctccaagtcgctaaagaagaaagggaaacacctactactgctagtatgccgccattattncgacaagtttgggaattaaaggatcaccaaggtgcagagccagccttcttattcggccttgaattgatcatatgcggattagaaaaacaacttaaatgcgaaagtgggtcttaa

SEQ ID NO: 561 - DNA, 627 bp, Artificial sequence
  SuR L6-5B02 CDS
  misc_feature (203)..(203): n is a, c, g, or t
  misc_feature (338)..(338): n is a, c, g, or t
  misc_feature (415)..(415): n is a, c, g, or t
atgggatctagattagataaaagtaaagtgattaacagcgcattagagctgcttaatgaggtcggaatcgaaggtttaacaacccgtaaactcgcccagaagctaggtgtagagcagcctacattgtattggcatgtaaaaaataagcgagctctgctcgacgccttagccattgagatgatggataggcaccaaactcactnttgccctttagaaggggaaagctggcaagattttttacgtaatactgctaaaagtatgagatgtgctttactaagccatcgcgatggagcaaaagtatgtttaggtacacgctggacagaacaactgtatgaagntgctgaaaatcaattagcctttttatgccaacaaggtttttcactagagaatgcattatatgcaatgagtgctgtgngggtgtttactttaggttgcgtattgtttgatcaagagctccaagtcgctaaagaagaaagggaaacacctactactgctagtatgccgccattatcccgacaagtttgggaattaaaggatcaccaaggtgcagagccagccttcttattcggccttgaattgatcatatgcggattagaaaaacaacttaaatgcgaaagtgggtcttaa

SEQ ID NO: 562 - DNA, 627 bp, Artificial sequence
  SuR L6-5B07 CDS
atgggatctagattagataaaagtaaagtgattaacagcgcattagagctgcttaatgaggtcggaatcgaaggtttaacaacccgtaaactcgcccagaagctaggtgtagagcagcctacattgtattggcatgtaaaaaataagcgagctctgctcgacgccttagccattgagatgatggataggcacgcaactcacatttgccctttagaaggggaaagctggcaagattttttacgtaataatgctaaaagtatgagatgtgctttactaagccatcgcgatggagcaaaagtatgtttaggtacacgctggacagaacaacaatatgaagctgctgaaaatatgttagcctttttatgccaacaaggtttttcactagagaatgcattatatgcaatgagtgctgtgagggtgtttactttaggttgcgtattgtttgatcaagagctccaagtcgctaaagaagaaagggaaacacctactactgctagtatgccgccattattgcgacaagtttgggaattaaaggatcaccaaggtgcagagccagccttcttattcggccttgaattgatcatatgcggattagaaaaacaacttaaatgcgaaagtgggtcttaa

SEQ ID NO: 563 - DNA, 627 bp, Artificial sequence
  SuR L6-5B08 CDS
atgggatctagattagataaaagtaaagtgattaacagcgcattagagctgcttaatgaggtcggaatcgaaggtttaacaacccgtaaactcgcccagaagctaggtgtagagcagcctacattgtattggcatgtaaaaaataagcgagctctgctcgacgccttagccattgagatgatggataggcaccaaactcacatttgccctttagaaggggaaagctggcaagattttttacgtaataatgctaaaagtatgagatgtgctttactaagccatcgcgatggagcaaaagtatgtttaggtacacgctggacagaacaacaatatgaaactgctgaaaatcaattagcctttttatgccaacaaggtttttcactagagaatgcattatatgcaatgagtgctgtgagggtgtttactttaggttgcgtattgtttgatcaagagagccaagtcgctaaagaagaaagggaaacacctactactgctagtatgccgccattagtgcgacaaggttgggaattaaaggatcaccaaggtgcagagccagccttcttattcggccttgaattgatcatatgcggattagaaaaacaacttaaatgcgaaagtgggtcttaa

SEQ ID NO: 564 - DNA, 627 bp, Artificial sequence
  SuR L6-5B11 CDS
atgggatctagattagataaaagtaaagtgattaacagcgcattagagctgcttaatgaggtcggaatcgaaggtttaacaacccgtaaactcgcccagaagctaggtgtagagcagcctacattgtattggcatgtaaaaaataagcgagctctgctcgacgccttagccattgagatgatggataggcaccaaactcacgtgtgccctttagaaggggaaagctggcaagattttttacgtaataatgctaaaagtatgagatgtgctttactaagccatcgcgatggagcaaaagtatgtttaggtacacgctggacagaacaacaatatgaaagtgctgaaaatatgttagcctttttatgccaacaaggtttttcactagagaatgcattatatgcaatgagtgctgtgagggtgtttactttaggttgcgtattgtttgatcaagagagccaagtcgctaaagaagaaagggaaacacctactactgctagtatgccgccattattgcgacaagttttggaattaaaggatcaccaaggtgcagagccagccttcttattcggccttgaattgatcatatgcggattagaaaaacaacttaaatgcgaaagtgggtcttaa

SEQ ID NO: 565 - DNA, 627 bp, Artificial sequence
  SuR L6-5C01 CDS
atgggatctagattagataaaagtaaagtgattaacagcgcattagagctgcttaatgaggtcggaatcgaaggtttaacaacccgtaaactcgcccagaagctaggtgtagagcagcctacattgtattggcatgtaaaaaataagcgagctctgctcgacgccttagccattgagatgatggataggcacgcaactaactattgccctttagaaggggaaagctggcaagattttttacgtaatactgctaaaagtatgagatgtgctttactaagccatcgcgatggagcaaaagtatgtttaggtacwcgctggacagaacaacaatatgaaactgctgaaaatatgttagcctttttatgccaacaaggtttttcactagagaatgcattatatgcagtgagtgctgtgagggtgtttactttaggttgcgtattgtttgatcaagagctccaagtcgctaaagaagaaagggaaacacctactactgctagtatgccgccattattgcgacaagtttgggaattaaaggatcaccaaggtgcagagccagccttcttattcggccttgaattgatcatatgcggattagaaaaacaacttaaatgcgaaagtgggtcttaa

SEQ ID NO: 566 - DNA, 627 bp, Artificial sequence
  SuR L6-5C02 CDS
atgggatctagattagataaaagtaaagtgattaacagcgcattagagctgcttaatgaggtcggaatcgaaggtttaacaacccgtaaactcgcccagaagctaggtgtagagcagcctacattgtattggcatgtaaaaaataagcgagctctgctcgacgccttagccattgagatgatggataggcaccaaactcacttttgccctttagaaggggaaagctggcaagattttttacgtaatactgctaaaagtatgagatgtgctttactaagccatcgcgatggagcaaaagtatggttaggtacacgctggacagaaaaacaatatgaaactgctgaaaatcaattagcctttttatgccaacaaggtttttcactagagaatgcattatatgcagtgagtgctgtgagggtgtttactttaggttgcgtattgtttgatcaagagctccaagtcgctaaagaagaaagggaaacacctactactgctagtatgccgccattattgcgacaagcttgggaattaaaggatcaccaaggtgcagagccagccttcttattcggccttgaattgatcatatgcggattagaaaaacaacttaaatgcgaaagtgggtcttaa

SEQ ID NO: 567 - DNA, 627 bp, Artificial sequence
  SuR L6-5C04 CDS
  misc_feature (325)..(325): n is a, c, g, or t
  misc_feature (328)..(330): n is a, c, g, or t
  misc_feature (337)..(337): n is a, c, g, or t
  misc_feature (415)..(415): n is a, c, g, or t
  misc_feature (418)..(420): n is a, c, g, or t
  misc_feature (513)..(513): n is a, c, g, or t
  misc_feature (521)..(521): n is a, c, g, or t
atgggatctagattagataaaagtaaagtgattaacagcgcattagagctgcttaatgaggtcggaatcgaaggtttaacaacccgtaaactcgcccagaagctaggtgtagagcagcctacattgtattggcatgtaaaaaataagcgagctctgctcgacgccttagccattgagatgatggataggcaccaaactcactattgccctttagaaggggaaagctggcaagattttttacgtaatactgctaaaagtatgagatgtgctttactaagccatcgcgatggagcaaaagtatgtttaggtacacgctggacagaanaannntatgaanctgctgaaaatcaattagcctttttatgccaacaaggtttttcactagagaatgcattatatgcaatgagtgctgtgnggnnntttactttaggttgcgtattgtttgatcaagagagccaagtcgctaaagaagaaagggaaacacctactactgctagtatgccgccattattncgacaagnttgggaattaaaggatcaccaaggtgcagagccagccttcttattcggccttgaattgatcatatgcggattagaaaaacaacttaaatgcgaaagtgggtcttaa

SEQ ID NO: 568 - DNA, 627 bp, Artificial sequence
  SuR L6-5C08 CDS
atgggatctagattagataaaagtaaagtgattaacagcgcattagagctgcttaatgaggtcggaatcgaaggtttaacaacccgtaaactcgcccagaagctaggtgtagagcagcctacattgtattggcatgtaaaaaataagcgagctctgctcgacgccttagccattgagatgatggataggcaccaaactcactattgccctttagaaggggaaagctggcaagattttttacgtaataatgctaaaagtatgagatgtgctttactaagccatcgcgatggagcaaaagtatgtttaggtacacgctggacagaacaattgtatgaaactgctgaaaatatgttagcctttttatgccaacaaggtttttcactagagaatgcattatatgcaatgagtgctgtgagggtgtttactttaggttgcgtattgtttgatcaagagagccaagtcgctaaagaagaaagggaaacacctactactgctagtatgccgccattattgcgacaagtttgggaattaaaggatcaccaaggtgcagagccagccttcttattcggccttgaattgatcatatgcggattagaaaaacaacttaaatgcgaaagtgggtcttaa

SEQ ID NO: 569 - DNA, 627 bp, Artificial sequence
  SuR L6-5C10 CDS
atgggatctagattagataaaagtaaagtgattaacagcgcattagagctgcttaatgaggtcggaatcgaaggtttaacaacccgtaaactcgcccagaagctaggtgtagagcagcctacattgtattggcatgtaaaaaataagcgagctctgctcgacgccttagccattgagatgatggataggcacgcaactcacttgtgccctttagaaggggaaagctggcaagattttttacgtaatactgctaaaagtatgagatgtgctttactaagccatcgcgatggagcaaaagtatgtttaggtacacgctggacagaacaacaatatgaagctgctgaaaatatgttagcctttttatgccaacaaggtttttcactagagaatgcattatatgcaatgagtgctgtgagggtgtttactttaggttgcgtattgtttgatcaagagagccaagtcgctaaagaagaaagggaaacacctactactgctagtatgccgccattattgcgacaagtttgggaattaaaggatcaccaaggtgcagagccagccttcttattcggccttgaattgatcatatgcggattagaaaaacaacttaaatgcgaaagtgggtcttaa

SEQ ID NO: 570 - DNA, 627 bp, Artificial sequence
  SuR L6-5C11 CDS
atgggatctagattagataaaagtaaagtgattaacagcgcattagagctgcttaatgaggtcggaatcgaaggtttaacaacccgtaaactcgcccagaagctaggtgtagagcagcctacattgtattggcatgtaaaaaataagcgagctctgctcgacgccttagccattgagatgatggataggcaccaaactcactattgccctttagaaggggaaagctggcaagattttttacgtaataatgctaaaagtatgagatgtgctttactaagccatcgcgatggagcaaaagtatgtttaggtacacgctggacagaaaaacattatgaaagtgctgaaaatatgttagcctttttatgccaacaaggtttttcactagagaatgcattatatgcaatgagtgctgtgagggtgtttactttaggttgcgtattgtttgatcaagagctccaagtcgctaaagaagaaagggaaacacctactactgctagtatgccgccattattgcgacaagtttgggaattaaaggatcaccaaggtgcagagccagccttcttattcggccttgaattgatcatatgcggattagaaaaacaacttaaatgcgaaagtgggtcttaa

SEQ ID NO: 571 - DNA, 627 bp, Artificial sequence
  SuR L6-5D04 CDS
atgggatctagattagataaaagtaaagtgattaacagcgcattagagctgcttaatgaggtcggaatcgaaggtttaacaacccgtaaactcgcccagaagctaggtgtagagcagcctacattgtattggcatgtaaaaaataagcgagctctgctcgacgccttagccattgagatgatggataggcaccaaactcactattgccctttagaaggggaaagctggcaagattttttacgtaataatgctaaaagtatgagatgtgctttactaagccatcgcgatggagcaaaagtatgtttaggtacacgctggacagaacaacattatgaaactgctgaaaatcaattagcctttttatgccaacaaggtttttcactagagaatgcattatatgcaatgagtgctgtgagggtgtttactttaggttgcgtattgtttgatcaagagagccaagtcgctaaagaagaaagggaaacacctactactgctagtatgccgccattagtgcgacaaggttgggaattaaaggatcaccaaggtgcagagccagccttcttattcggccttgaattgatcatatgcggattagaaaaacaacttaaatgcgaaagtgggtcttaa

SEQ ID NO: 572 - DNA, 627 bp, Artificial sequence
  SuR L6-5D09 CDS
atgggatctagattagataaaagtaaagtgattaacagcgcattagagctgcttaatgaggtcggaatcgaaggtttaacaacccgtaaactcgcccagaagctaggtgtagagcagcctacattgtattggcatgtaaaaaataagcgagctctgctcgacgccttagccattgagatgatggataggcacgcaactcactattgccctttagaaggggaaagctggcaagattttttacgtaataatgctaaaagtatgagatgtgctttactaagccatcgcgatggagcaaaagtatgtttaggtacacgctggacagaaaaacaatatgaagctgctgaaaatcaattagcctttttatgccaacaaggtttttcactagagaatgcattatatgcagtgagtgctgtgagggtgtttactttaggttgcgtattgtttgatcaagagagccaagtcgctaaagaagaaagggaaacacctactactgctagtatgccgccattattgcgacaaggttgggaattaaaggatcaccaaggtgcagagccagccttcttattcggccttgaattgatcatatgcggattagaaaaacaacttaaatgcgaaagtgggtcttaa

SEQ ID NO: 573 - DNA, 627 bp, Artificial sequence
  SuR L6-5D11 CDS
atgggatctagattagataaaagtaaagtgattaacagcgcattagagctgcttaatgaggtcggaatcgaaggtttaacaacccgtaaactcgcccagaagctaggtgtagagcagcctacattgtattggcatgtaaaaaataagcgagctctgctcgacgccttagccattgagatgatggataggcacgcaactcactattgccctttagaaggggaaagctggcaagattttttacgtaataatgctaaaagtatgagatgtgctttactaagccatcgcgatggagcaaaagtatgtttaggtacacgctggacagaacaattgtatgaagctgctgaaaatcaattagcctttttatgccaacaaggtttttcactagagaatgcattatatgcaatgagtgctgtgagggtgtttactttaggttgcgtattgtttgatcaagagagccaagtcgctaaagaagaaagggaaacacctactactgctagtatgccgccattagtgcgacaagtttgggaattaaaggatcaccaaggtgcagagccagccttcttattcggccttgaattgatcatatgcggattagaaaaacaacttaaatgcgaaagtgggtcttaa

SEQ ID NO: 574 - DNA, 627 bp, Artificial sequence; identical to SEQ ID NO: 434
  SuR L6-5D12 CDS

SEQ ID NO: 575 - DNA, 627 bp, Artificial sequence
  SuR L6-5E05 CDS
atgggatctagattagataaaagtaaagtgattaacagcgcattagagctgcttaatgaggtcggaatcgaaggtttaacaacccgtaaactcgcccagaagctaggtgtagagcagcctacattgtattggcatgtaaaaaataagcgagctctgctcgacgccttagccattgagatgatggataggcaccaaactcactattgccctttagaaggggaaagctggcaagattttttacgtaataatgctaaaagtatgagatgtgctttactaagccatcgcgatggagcaaaagtatgtttaggtacacgctggacagaaaaacattatgaaactgctgaaaatatgttagcctttttatgccaacaaggtttttcactagagaatgcattatatgcagtgagtgctgtgagggtgtttactttaggttgcgtattgtttgatcaagagctccaagtcgctaaagaagaaagggaaacacctactactgctagtatgccgccattattgcgacaagtttgggaattaaaggatcaccaaggtgcagagccagccttcttattcggccttgaattgatcatatgcggattagaaaaacaacttaaatgcgaaagtgggtcttaa

SEQ ID NO: 576 - DNA, 627 bp, Artificial sequence
  SuR L6-5E09 CDS
  misc_feature (193)..(193): n is a, c, g, or t
  misc_feature (330)..(330): n is a, c, g, or t
  misc_feature (337)..(338): n is a, c, g, or t
  misc_feature (403)..(403): n is a, c, g, or t
  misc_feature (512)..(512): n is a, c, g, or t
atgggatctagattagataaaagtaaagtgattaacagcgcattagagctgcttaatgaggtcggaatcgaaggtttaacaacccgtaaactcgcccagaagctaggtgtagagcagcctacattgtattggcatgtaaaaaataagcgagctctgctcgacgccttagccattgagatgatggataggcacncaactcactattgccctttagaaggggaaagctggcaagattttttacgtaatactgctaaaagtatgagatgtgctttactaagccatcgcgatggagcaaaagtatggttaggtacacgctggacagaacaacantatgaanntgctgaaaatctgttagcctttttatgccaacaaggtttttcactagagaatgcattatatgcantgagtgctgtgaggaactttactttaggttgcgtattgtttgatcaagagagccaagtcgctaaagaagaaagggaaacacctactactgctagtatgccgccattatnccgacaaggttgggaattaaaggatcaccaaggtgcagagccagccttcttattcggccttgaattgatcatatgcggattagaaaaacaacttaaatgcgaaagtgggtcttaa

SEQ ID NO: 577 - DNA, 627 bp, Artificial sequence
  SuR L6-5F02 CDS
atgggatctagattagataaaagtaaagtgattaacagcgcattagagctgcttaatgaggtcggaatcgaaggtttaacaacccgtaaactcgcccagaagctaggtgtagagcagcctacattgtattggcatgtaaaaaataagcgagctctgctcgacgccttagccattgagatgatggataggcaccaaactcacatttgccctttagaaggggaaagctggcaagattttttacgtaatactgctaaaagtatgagatgtgctttactaagccatcgcgatggagcaaaagtatgtttaggtacacgctggacagaaaaacattatgaagctgctgaaaatatgttagcctttttatgccaacaaggtttttcactagagaatgcattatatgcagtgagtgctgtgagggtgtttactttaggttgcgtattgtttgatcaagagagccaagtcgctaaagaagaaagggaaacacctactactgctagtatgccgccattagtgcgacaagtttgggaattaaaggatcaccaaggtgcagagccagccttcttattcggccttgaattgatcatatgcggattagaaaaacaacttaaatgcgaaagtgggtcttaa

SEQ ID NO: 578 - DNA, 627 bp, Artificial sequence
  SuR L6-5F04 CDS
atgggatctagattagataaaagtaaagtgattaacagcgcattagagctgcttaatgaggtcggaatcgaaggtttaacaacccgtaaactcgcccagaagctaggtgtagagcagcctacattgtattggcatgtaaaaaataagcgagctctgctcgacgccttagccattgagatgatggataggcaccaaactcactattgccctttagaaggggaaagctggcaagattttttacgtaataatgctaaaagtatgagatgtgctttactaagccatcgcgatggagcaaaagtatgtttaggtacacgctggacagaacaattgtatgaaagtgctgaaaatcaattagcctttttatgccaacaaggtttttcactagagaatgcattatatgcaatgagtgctgtgagggtgtttactttaggttgcgtattgtttgatcaagagctccaagtcgctaaagaagaaagggaaacacctactactgctagtatgccgccattattgcgacaaggttgggaattaaaggatcaccaaggtgcagagccagccttcttattcggccttgaattgatcatatgcggattagaaaaacaacttaaatgcgaaagtgggtcttaa

SEQ ID NO: 579 - DNA, 627 bp, Artificial sequence
  SuR L6-5F05 CDS
atgggatctagattagataaaagtaaagtgattaacagcgcattagagctgcttaatgaggtcggaatcgaaggtttaacaacccgtaaactcgcccagaagctaggtgtagagcagcctacattgtattggcatgtaaaaaataagcgagctctgctcgacgccttagccattgagatgatggataggcacgcaactcacatttgccctttagaaggggaaagctggcaagattttttacgtaataatgctaaaagtatgagatgtgctttactaagccatcgcgatggagcaaaagtatgtttaggtacacgctggacagaacaacaatatgaagctgctgaaaatcaattagcctttttatgccaacaaggtttttcactagagaatgcattatatgcagtgagtgctgtgagggtgtttactttaggttgcgtattgtttgatcaagagctccaagtcgctaaagaagaaagggaaacacctactactgctagtatgccgccattattgcgacaagcttgggaattaaaggatcaccaaggtgcagagccagccttcttattcggccttgaattgatcatatgcggattagaaaaacaacttaaatgcgaaagtgggtcttaa

SEQ ID NO: 580 - DNA, 627 bp, Artificial sequence
  SuR L6-5F07 CDS
atgggatctagattagataaaagtaaagtgattaacagcgcattagagctgcttaatgaggtcggaatcgaaggtttaacaacccgtaaactcgcccagaagctaggtgtagagcagcctacattgtattggcatgtaaaaaataagcgagctctgctcgacgccttagccattgagatgatggataggcacgcaactcactattgccctttagaaggggaaagctggcaagattttttacgtaataatgctaaaagtatgagatgtgctttactaagccatcgcgatggagcaaaagtatgtttaggtacacgctggacagaaaaacaatatgaaactgctgaaaatcaattagcctttttatgccaacaaggtttttcactagagaatgcattatatgcagtgagtgctgtgagggtgtttactttaggttgcgtattgtttgatcaagagctccaagtcgctaaagaagaaagggaaacacctactactgctagtatgccgccattattgcgacaagtttgggaattaaaggatcaccaaggtgcagagccagccttcttattcggccttgaattgatcatatgcggattagaaaaacaacttaaatgcgaaagtgggtcttaa

SEQ ID NO: 581 - DNA, 627 bp, Artificial sequence
  SuR L6-5F08 CDS
atgggatctagattagataaaagtaaagtgattaacagcgcattagagctgcttaatgaggtcggaatcgaaggtttaacaacccgtaaactcgcccagaagctaggtgtagagcagcctacattgtattggcatgtaaaaaataagcgagctctgctcgacgccttagccattgagatgatggataggcacgcaactcactattgccctttagaaggggaaagctggcaagattttttacgtaataatgctaaaagtatgagatgtgctttactaagccatcgcgatggagcaaaagtatgtttaggtacacgctggacagaaaaacattatgaaactgctgaaaatcaattagcctttttatgccaacaaggtttttcactagagaatgcattatatgcaatgagtgctgtgagggtgtttactttaggttgcgtattgtttgatcaagagagccaagtcgctaaagaagaaagggaaacacctactactgctagtatgccgccattattgcgacaagtttgggaattaaaggatcaccaaggtgcagagccagccttcttattcggccttgaattgatcatatgcggattagaaaaacaacttaaatgcgaaagtgggtcttaa

SEQ ID NO: 582 - DNA, 627 bp, Artificial sequence
  SuR L6-5F10 CDS
  misc_feature (328)..(328): n is a, c, g, or t
atgggatctagattagataaaagtaaagtgattaacagcgcattagagctgcttaatgaggtcggaatcgaaggtttaacaacccgtaaactcgcccagaagctaggtgtagagcagcctacattgtattggcatgtaaaaaataagcgagctctgctcgacgccttagccattgagatgatggataggcaccaaactcactattgccctttagaaggggaaagctggcaagattttttacgtaataatgctaaaagtatgagatgtgctttactaagccatcgcgatggagcaaaagtatggttaggtacacgctggacagaacaantgtatgaagctgctgaaaatatgttagcctttttatgccaacaaggtttttcactagagaatgcattatatgcagtgagtgctgtgggggtgtttactttaggttgcgtattgtttgatcaagagctccaagtcgctaaagaagaaagggaaacacctactactgctagtatgccgccattagcccgacaagttttggaattaaaggatcaccaaggtgcagagccagccttcttattcggccttgaattgatcatatgcggattagaaaaacaacttaaatgcgaaagtgggtcttaa

SEQ ID NO: 583 - DNA, 627 bp, Artificial sequence
  SuR L6-5F12 CDS
atgggatctagattagataaaagtaaagtgattaacagcgcattagagctgcttaatgaggtcggaatcgaaggtttaacaacccgtaaactcgcccagaagctaggtgtagagcagcctacattgtattggcatgtaaaaaataagcgagctctgctcgacgccttagccattgagatgatggataggcacgcaactcactattgccctttagaaggggaaagctggcaagattttttacgtaataatgctaaaagtatgagatgtgctttactaagccatcgcgatggagcaaaagtatgtttaggtacacgctggacagaaaaattgtatgaagctgctgaaaatatgttagcctttttatgccaacaaggtttttcactagagaatgcattatatgcagtgagtgctgtgagggtgtttactttaggttgcgtattgtttgatcaagagagccaagtcgctaaagaagaaagggaaacacctactactgctagtatgccgccattattgcgacaagtttgggaattaaaggatcaccaaggtgcagagccagccttcttattcggccttgaattgatcatatgcggattagaaaaacaacttaaatgcgaaagtgggtcttaa

SEQ ID NO: 584 - DNA, 627 bp, Artificial sequence
  SuR  L6-5G03 CDS
atgggatctagattagataaaagtaaagtgattaacagcgcattagagctgcttaatgaggtcggaatcgaaggtttaacaacccgtaaactcgcccagaagctaggtgtagagcagcctacattgtattggcatgtaaaaaataagcgagctctgctcgacgccttagccattgagatgatggataggcacgcaactcacatgtgccctttagaaggggaaagctggcaagattttttacgtaataatgctaaaagtatgagatgtgctttactaagccatcgcgatggagcaaaagtatggttaggtacacgctggacagaacaacaatatgaaactgctgaaaatatgttagcctttttatgccaacaaggtttttcactagagaatgcattatatgcagtgagtgctgtgagggtgtttactttaggttgcgtattgtttgatcaagagctccaagtcgctaaagaagaaagggaaacacctactactgctagtatgccgccattattgcgacaagtttgggaattaaaggatcaccaaggtgcagagccagccttcttattcggccttgaattgatcatatgcggattagaaaaacaacttaaatgcgaaagtgggtcttaa

SEQ ID NO: 585 - DNA, 627 bp, Artificial sequence
  SuR L6-5G05 CDS
atgggatctagattagataaaagtaaagtgattaacagcgcattagagctgcttaatgaggtcggaatcgaaggtttaacaacccgtaaactcgcccagaagctaggtgtagagcagcctacattgtattggcatgtaaaaaataagcgagctctgctcgacgccttagccattgagatgatggataggcaccaaactcactattgccctttagaaggggaaagctggcaagattttttacgtaataatgctaaaagtatgagatgtgctttactaagccatcgcgatggagcaaaagtatgtttaggtacacgctggacagaaaaacaatatgaaactgctgaaaatcaattagcctttttatgccaacaaggtttttcactagagaatgcattatatgcaatgagtgctgtgaggaactttactttaggttgcgtattgtttgatcaagagagccaagtcgctaaagaagaaagggaaacacctactactgctagtatgccgccattattgcgacaagcttgggaattaaaggatcaccaaggtgcagagccagccttcttattcggccttgaattgatcatatgcggattagaaaaacaacttaaatgcgaaagtgggtcttaa

SEQ ID NO: 586 - DNA, 627 bp, Artificial sequence
  SuR L6-5G06 CDS
atgggatctagattagataaaagtaaagtgattaacagcgcattagagctgcttaatgaggtcggaatcgaaggtttaacaacccgtaaactcgcccagaagctaggtgtagagcagcctacattgtattggcatgtaaaaaataagcgagctctgctcgacgccttagccattgagatgatggataggcaccaaactcactattgccctttagaaggggaaagctggcaagattttttacgtaataatgctaaaagtatgagatgtgctttactaagccatcgcgatggagcaaaagtatgtttaggtacacgctggacagaacaacaatatgaaactgctgaaaatcaattagcctttttatgccaacaaggtttttcactagagaatgcattatatgcagtgagtgctgtgagggtgtttactttaggttgcgtattgtttgatcaagagctccaagtcgctaaagaagaaagggaaacacctactactgctagtatgccgccattattgcgacaaggttgggaattaaaggatcaccaaggtgcagagccagccttcttattcggccttgaattgatcatatgcggattagaaaaacaacttaaatgcgaaagtgggtcttaa

SEQ ID NO: 587 - DNA, 627 bp, Artificial sequence
  SuR L6-5G08 CDS
atgggatctagattagataaaagtaaagtgattaacagcgcattagagctgcttaatgaggtcggaatcgaaggtttaacaacccgtaaactcgcccagaagctaggtgtagagcagcctacattgtattggcatgtaaaaaataagcgagctctgctcgacgccttagccattgagatgatggataggcaccaaactcacatttgccctttagaaggggaaagctggcaagattttttacgtaataatgctaaaagtatgagatgtgctttactaagccatcgcgatggagcaaaagtatgtttaggtacacgctggacagaaaaattgtatgaaactgctgaaaatcaattagcctttttatgccaacaaggtttttcactagagaatgcattatatgcaatgagtgctgtgagggtgtttactttaggttgcgtattgtttgatcaagagctccaagtcgctaaagaagaaagggaaacacctactactgctagtatgccgccattagtccgacaagtttgggaattaaaggatcaccaaggtgcagagccagccttcttattcggccttgaattgatcatatgcggattagaaaaacaacttaaatgcgaaagtgggtcttaa

SEQ ID NO: 588 - DNA, 627 bp, Artificial sequence
  SuR L6-5G11 CDS
atgggatctagattagataaaagtaaagtgattaacagcgcattagagctgcttaatgaggtcggaatcgaaggtttaacaacccgtaaactcgcccagaagctaggtgtagagcagcctacattgtattggcatgtaaaaaataagcgagctctgctcgacgccttagccattgagatgatggataggcaccaaactcacatttgccctttagaaggggaaagctggcaagattttttacgtaataatgctaaaagtatgagatgtgctttactaagccatcgcgatggagcaaaagtatgtttaggtacacgctggacagaaaaacaatatgaaagtgctgaaaatatgttagcctttttatgccaacaaggtttttcactagagaatgcattatatgcagtgagtgctgtgagggtgtttactttaggttgcgtattgtttgatcaagagctccaagtcgctaaagaagaaagggaaacacctactactgctagtatgccgccattagtgcgacaagtttgggaattaaaggatcaccaaggtgcagagccagccttcttattcggccttgaattgatcatatgcggattagaaaaacaacttaaatgcgaaagtgggtcttaa

SEQ ID NO: 589 - DNA, 627 bp, Artificial sequence
  SuR L6-5G12 CDS
atgggatctagattagataaaagtaaagtgattaacagcgcattagagctgcttaatgaggtcggaatcgaaggtttaacaacccgtaaactcgcccagaagctaggtgtagagcagcctacattgtattggcatgtaaaaaataagcgagctctgctcgacgccttagccattgagatgatggataggcacgcaactcacttgtgccctttagaaggggaaagctggcaagattttttacgtaataatgctaaaagtatgagatgtgctttactaagccatcgcgatggagcaaaagtatgtttaggtacacgctggacagaaaaacaatatgaagctgctgaaaatcaattagcctttttatgccaacaaggtttttcactagagaatgcattatatgcagtgagtgctgtgagggtgtttactttaggttgcgtattgtttgatcaagagagccaagtcgctaaagaagaaagggaaacacctactactgctagtatgccgccattattgcgacaagtttgggaattaaaggatcaccaaggtgcagagccagccttcttattcggccttgaattgatcatatgcggattagaaaaacaacttaaatgcgaaagtgggtcttaa

SEQ ID NO: 590 - DNA, 627 bp, Artificial sequence
  SuR L6-5H03 CDS
atgggatctagattagataaaagtaaagtgattaacagcgcattagagctgcttaatgaggtcggaatcgaaggtttaacaacccgtaaactcgcccagaagctaggtgtagagcagcctacattgtattggcatgtaaaaaataagcgagctctgctcgacgccttagccattgagatgatggataggcacgcaactcacttgtgccctttagaaggggaaagctggcaagattttttacgtaataatgctaaaagtatgagatgtgctttactaagccatcgcgatggagcaaaagtatgtttaggtacacgctggacagaacaattgtatgaaactgctgaaaatatgttagcctttttatgccaacaaggtttttcactagagaatgcattatatgcagtgagtgctgtgaggaactttactttaggttgcgtattgtttgatcaagagagccaagtcgctaaagaagaaagggaaacacctactactgctagtatgccgccattattgcgacaagtttgggaattaaaggatcaccaaggttcagagccagccttcttattcggccttgaattgatcatatgcggattagaaaaacaacttaaatgcgaaagtgggtcttaa

SEQ ID NO: 591 - DNA, 627 bp, Artificial sequence
  SuR L6-5H06 CDS
atgggatctagattagataaaagtaaagtgattaacagcgcattagagctgcttaatgaggtcggaatcgaaggtttaacaacccgtaaactcgcccagaagctaggtgtagagcagcctacattgtattggcatgtaaaaaataagcgagctctgctcgacgccttagccattgagatgatggataggcaccaaactcacatttgccctttagaaggggaaagctggcaagattttttacgtaataatgctaaaagtatgagatgtgctttactaagccatcgcgatggagcaaaagtatgtttaggtacacggtggacagaaaaacaatatgaaactgctgaaaatatgttagcctttttatgccaacaaggtttttcactagagaatgcattatatgcagtgagtgctgtgagggtgtttactttaggttgcgtattgtttgatcaagagctccaagtcgctaaagaagaaagggaaacacctactactgctagtatgccgccattagtgcgacaagcttgggaattaaaggatcaccaaggtgcagagccagccttcttattcggccttgaattgatcatatgcggattagaaaaacaacttaaatgcgaaagtgggtcttaa

SEQ ID NO: 592 - DNA, 627 bp, Artificial sequence
  SuR L6-5H07 CDS
atgggatctagattagataaaagtaaagtgattaacagcgcattagagctgcttaatgaggtcggaatcgaaggtttaacaacccgtaaactcgcccagaagctaggtgtagagcagcctacattgtattggcatgtaaaaaataagcgagctctgctcgacgccttagccattgagatgatggataggcaccaaactcacatgtgccctttagaaggggaaagctggcaagattttttacgtaataatgctaaaagtatgagatgtgctttactaagccatcgcgatggagcaaaagtatgtttaggtacacgctggacagaacaacaatatgaagctgctgaaaatatgttagcctttttatgccaacaaggtttttcactagagaatgcattatatgcaatgagtgctgtgaggaactttactttaggttgcgtattgtttgatcaagagagccaagtcgctaaagaagaaagggaaacacctactactgctagtatgccgccattattgcgacaagcttgggaattaaaggatcaccaaggtgcagagccagccttcttattcggccttgaattgatcatatgcggattagaaaaacaacttaaatgcgaaagtgggtcttaa

SEQ ID NO: 593 - DNA, 627 bp, Artificial sequence
  SuR L6-5H12 CDS
atgggatctagattagataaaagtaaagtgattaacagcgcattagagctgcttaatgaggtcggaatcgaaggtttaacaacccgtaaactcgcccagaagctaggtgtagagcagcctacattgtattggcatgtaaaaaataagcgagctctgctcgacgccttagccattgagatgatggataggcacgcaactcactattgccctttagaaggggaaagctggcaagattttttacgtaataatgctaaaagtatgagatgtgctttactaagccatcgcgatggagcaaaagtatgtttaggtacacgctggacagaaaaacaatatgaaactgctgaaaatcaattagcctttttatgccaacaaggtttttcactagagaatgcattatatgcaatgagtgctgtgagggtgtttactttaggttgcgtattgtttgatcaagagctccaagtcgctaaagaagaaagggaaacacctactactgctagtatgccgccattagtgcgacaagcttgggaattaaaggatcaccaaggtgcagagccagccttcttattcggccttgaattgatcatatgcggattagaaaaacaacttaaatgcgaaagtgggtcttaa

SEQ ID NO: 594 - DNA, 627 bp, Artificial sequence
  SuR L6-6A09 CDS
atgggatctagattagataaaagtaaagtgattaacagcgcattagagctgcttaatgaggtcggaatcgaaggtttaacaacccgtaaactcgcccagaagctaggtgtagagcagcctacattgtattggcatgtaaaaaataagcgagctctgctcgacgccttagccattgagatgatggataggcaccaaactcactattgccctttagaaggggaaagctggcaagattttttacgtaatactgctaaaagtatgagatgtgctttactaagccatcgcgatggagcaaaagtatgtttaggtacacgctggacagaaaaacaatatgaaactgctgaaaatatgttagcctttttatgccaacaaggtttttcactagagaatgcattatatgcagtgagtgctgtgagggtgtttactttaggttgcgtattgtttgatcaagagagccaagtcgctaaagaagaaagggaaacacctactactgctagtatgccgccattattgcgacaaggtttggaattaaaggatcaccaaggtgcagagccagccttcttattcggccttgaattgatcatatgcggattagaaaaacaacttaaatgcgaaagtgggtcttaa

SEQ ID NO: 595 - DNA, 627 bp, Artificial sequence
  SuR L6-6B01 CDS
  misc_feature (194)..(194): n is a, c, g, or t
atgggatctagattagataaaagtaaagtgattaacagcgcattagagctgcttaatgaggtcggaatcgaaggtttaacaacccgtaaactcgcccagaagctaggtgtagagcagcctacattgtattggcatgtaaaaaataagcgagctctgctcgacgccttagccattgagatgatggataggcaccnaactcactattgccctttagaaggggaaagctggcaagattttttacgtaataatgctaaaagtatgagatgtgctttactaagccatcgcgatggagcaaaagtatgtttaggtacacgctggacagaaaaacattatgaaactgctgaaaatatgttagcctttttatgccaacaaggtttttcactagagaatgcattatatgcaatgagtgctgtgaggaactttactttaggtggcgtattgtttgatcaagagagccaagtcgctaaagaagaaagggaaacacctactactgctagtatgccgccattagcccgacaagtttgggaattaaaggatcaccaaggtgcagagccagccttcttattcggccttgaattgatcatatgcggattagaaaaacaacttaaatgcgaaagtgggtcttaa

SEQ ID NO: 596 - DNA, 627 bp, Artificial sequence
  SuR L6-6B03 CDS
atgggatctagattagataaaagtaaagtgattaacagcgcattagagctgcttaatgaggtcggaatcgaaggtttaacaacccgtaaactcgcccagaagctaggtgtagagcagcctacattgtattggcatgtaaaaaataagcgagctctgctcgacgccttagccattgagatgatggataggcaccaaactcacatttgccctttagaaggggaaagctggcaagattttttacgtaataatgctaaaagtatgagatgtgctttactaagccatcgcgatggagcaaaagtatgtttaggtacacgctggacagaaaaaatgtatgaaactgctgaaaatcaattagcctttttatgccaacaaggtttttcactagagaatgcattatatgcaatgagtgctgtgagggtgtttactttaggttgcgtattgtttgatcaagagctccaagtcgctaaagaagaaagggaaacacctactactgctagtatgccgccattattgcgacaagcttgggaattaaaggatcaccaaggtgcagagccagccttcttattcggccttgaattgatcatatgcggattagaaaaacaacttaaatgcgaaagtgggtcttaa

SEQ ID NO: 597 - DNA, 627 bp, Artificial sequence
  SuR L6-6B04 CDS
atgggatctagattagataaaagtaaagtgattaacagcgcattagagctgcttaatgaggtcggaatcgaaggtttaacaacccgtaaactcgcccagaagctaggtgtagagcagcctacattgtattggcatgtaaaaaataagcgagctctgctcgacgccttagccattgagatgatggataggcaccaaactcactattgccctttagaaggggaaagctggcaagattttttacgtaatactgctaaaagtatgagatgtgctttactaagccatcgcgatggagcaaaagtatgtttaggtacacgctggacagaacaacaatatgaaactgctgaaaatatgttagcctttttatgccaacaaggtttttcactagagaatgcattatatgcagtgagtgctgtgagggtgtttactttaggttgcgtattgtttgatcaagagagccaagtcgctaaagaagaaagggaaacacctactactgctagtatgccgccattattgcgacaagcttgggaattaaaggatcaccaaggtgcagagccagccttcttattcggccttgaattgatcatatgcggattagaaaaacaacttaaatgcgaaagtgggtcttaa

SEQ ID NO: 598 - DNA, 627 bp, Artificial sequence
  SuR L6-6B05 CDS
atgggatctagattagataaaagtaaagtgattaacagcgcattagagctgcttaatgaggtcggaatcgaaggtttaacaacccgtaaactcgcccagaagctaggtgtagagcagcctacattgtattggcatgtaaaaaataagcgagctctgctcgacgccttagccattgagatgatggataggcacgcaactcactattgccctttagaaggggaaagctggcaagattttttacgtaataatgctaaaagtatgagatgtgctttactaagccatcgcgatggagcaaaagtatgtttaggtacacgctggacagaacaacattatgaaactgctgaaaatcaattagcctttttatgccaacaaggtttttcactagagaatgcattatatgcagtgagtgctgtgagggtgtttactttaggttgcgtattgtttgatcaagagagccaagtcgctaaagaagaaagggaaacacctactactgctagtatgccgccattattgcgacaagtttgggaattaaaggatcaccaaggtgcagagccagccttcttattcggccttgaattgatcatatgcggattagaaaaacaacttaaatgcgaaagtgggtcttaa

SEQ ID NO: 599 - DNA, 627 bp, Artificial sequence
  SuR L6-6B10 CDS
atgggatctagattagataaaagtaaagtgattaacagcgcattagagctgcttaatgaggtcggaatcgaaggtttaacaacccgtaaactcgcccagaagctaggtgtagagcagcctacattgtattggcatgtaaaaaataagcgagctctgctcgacgccttagccattgagatgatggataggcacgcaactcacttgtgccctttagaaggggaaagctggcaagattttttacgtaataatgctaaaagtatgagatgtgctttactaagccatcgcgatggagcaaaagtatgtttaggtacacgctggacagaaaaacaatatgaaactgctgaaaatcaattagcctttttatgccaacaaggtttttcactagagaatgcattatatgcagtgagtgctgtgagggtgtttactttaggttgcgtattgtttgatcaagagagccaagtcgctaaagaagaaagggaaacacctactactgctagtatgccgccattattgcgacaagtttgggaattaaaggatcaccaaggtgcagagccagccttcttattcggccttgaattgatcatatgcggattagaaaaacaacttaaatgcgaaagtgggtcttaa

SEQ ID NO: 600 - DNA, 627 bp, Artificial sequence
  SuR L6-6C01 CDS
atgggatctagattagataaaagtaaagtgattaacagcgcattagagctgcttaatgaggtcggaatcgaaggtttaacaacccgtaaactcgcccagaagctaggtgtagagcagcctacattgtattggcatgtaaaaaataagcgagctctgctcgacgccttagccattgagatgatggataggcaccaaactcactattgccctttagaaggggaaagctggcaagattttttacgtaataatgctaaaagtatgagatgtgctttactaagccatcgcgatggagcaaaagtatgtttaggtacacgctggacagaacaacaatatgaaactgctgaaaatatgttagcctttttatgccaacaaggtttttcactagagaatgcattatatgcaatgagtgctgtgagggtgtttactttaggttgcgtattgtttgatcaagagagccaagtcgctaaagaagaaagggaaacacctactactgctagtatgccgccattattgcgacaagctttggaattaaaggatcaccaaggtgcagagccagccttcttattcggccttgaattgatcatatgcggattagaaaaacaacttaaatgcgaaagtgggtcttaa

SEQ ID NO: 601 - DNA, 627 bp, Artificial sequence
  SuR L6-6C02 CDS
atgggatctagattagataaaagtaaagtgattaacagcgcattagagctgcttaatgaggtcggaatcgaaggtttaacaacccgtaaactcgcccagaagctaggtgtagagcagcctacattgtattggcatgtaaaaaataagcgagctctgctcgacgccttagccattgagatgatggataggcaccaaactcacttttgccctttagaaggggaaagctggcaagattttttacgtaatactgctaaaagtatgagatgtgctttactaagccatcgcgatggagcaaaagtatgtttaggtacacgctggacagaacaattgtatgaagctgctgaaaatatgttagcctttttatgccaacaaggtttttcactagagaatgcattatatgcagtgagtgctgtgagggtgtttactttaggttgcgtattgtttgatcaagagagccaagtcgctaaagaagaaagggaaacacctactactgctagtatgccgccattattgcgacaaggttgggaattaaaggatcaccaaggtgcagagccagccttcttattcggccttgaattgatcatatgcggattagaaaaacaacttaaatgcgaaagtgggtcttaa

SEQ ID NO: 602 - DNA, 627 bp, Artificial sequence
  SuR L6-6C04 CDS
atgggatctagattagataaaagtaaagtgattaacagcgcattagagctgcttaatgaggtcggaatcgaaggtttaacaacccgtaaactcgcccagaagctaggtgtagagcagcctacattgtattggcatgtaaaaaataagcgagctctgctcgacgccttagccattgagatgatggataggcacgcaactcacttgtgccctttagaaggggaaagctggcaagattttttacgtaataatgctaaaagtatgagatgtgctttactaagccatcgcgatggagcaaaagtatgtttaggtacacgctggacagaacaattgtatgaaactgctgaaaatcaattagcctttttatgccaacaaggtttttcactagagaatgcattatatgcagtgagtgctgtgagggtgtttactttaggttgcgtattgtttgatcaagagagccaagtcgctaaagaagaaagggaaacacctactactgctagtatgccgccattattgcgacaagtttgggaattaaaggatcaccaaggtgcagagccagccttcttattcggccttgaattgatcatatgcggattagaaaaacaacttaaatgcgaaagtgggtcttaa

SEQ ID NO: 603 - DNA, 627 bp, Artificial sequence
  SuR L6-6C05 CDS
atgggatctagattagataaaagtaaagtgattaacagcgcattagagctgcttaatgaggtcggaatcgaaggtttaacaacccgtaaactcgcccagaagctaggtgtagagcagcctacattgtattggcatgtaaaaaataagcgagctctgctcgacgccttagccattgagatgatggataggcaccaaactcactattgccctttagaaggggaaagctggcaagattttttacgtaataatgctaaaagtatgagatgtgctttactaagccatcgcgatggagcaaaagtatgtttaggtacacgctggacagaacaaatgtatgaaggtgctgaaaatatgttagcctttttatgccaacaaggtttttcactagagaatgcattatatgcagtgagtgctgtgaggaactttactttaggttgcgtattgtttgatcaagagagccaagtcgctaaagaagaaagggaaacacctactactgctagtatgccgccattattgcgacaagcttgggaattaaaggatcaccaaggtgcagagccagccttcttattcggccttgaattgatcatatgcggattagaaaaacaacttaaatgcgaaagtgggtcttaa

SEQ ID NO: 604 - DNA, 627 bp, Artificial sequence
  SuR L6-6C06 CDS
atgggatctagattagataaaagtaaagtgattaacagcgcattagagctgcttaatgaggtcggaatcgaaggtttaacaacccgtaaactcgcccagaagctaggtgtagagcagcctacattgtattggcatgtaaaaaataagcgagctctgctcgacgccttagccattgagatgatggataggcacgcaactcactattgccctttagaaggggaaagctggcaagattttttacgtaataatgctaaaagtatgagatgtgctttactaagccatcgcgatggagcaaaagtatgtttaggtacacgctggacagaacaacaatatgaaactgctgaaaatcaattagcctttttatgccaacaaggtttttcactagagaatgcattatatgcaatgagtgctgtgagggtgtttactttaggttgcgtattgtttgatcaagagagccaagtcgctaaagaagaaagggaaacacctactagtgctagtatgccgccattagtgcgacaagtttgggaattaaaggatcaccaaggtgcagagccagccttcttattcggccttgaattgatcatatgcggattagaaaaacaacttaaatgcgaaagtgggtcttaa

SEQ ID NO: 605 - DNA, 627 bp, Artificial sequence
  SuR L6-6C07 CDS
atgggatctagattagataaaagtaaagtgattaacagcgcattagagctgcttaatgaggtcggaatcgaaggtttaacaacccgtaaactcgcccagaagctaggtgtagagcagcctacattgtattggcatgtaaaaaataagcgagctctgctcgacgccttagccattgagatgatggataggcaccaaactcactattgccctttagaaggggaaagctggcaagattttttacgtaatactgctaaaagtatgagatgtgctttactaagccatcgcgatggagcaaaagtatgtttaggtacacgctggacagaaaaacaatatgaagctgctgaaaatatgttagcctttttatgccaacaaggtttttcactagagaatgcattatatgcaatgagtgctgtgagggtgtttactttaggttgcgtattgtttgatcaagagagccaagtcgctaaagaagaaagggaaacacctactactgctagtatgccgccattattgcgacaagcttgggaattaaaggatcaccaaggtgcagagccagccttcttattcggccttgaattgatcatatgcggattagaaaaacaacttaaatgcgaaagtgggtcttaa

SEQ ID NO: 606 - DNA, 627 bp, Artificial sequence
  SuR L6-6C10 CDS
atgggatctagattagataaaagtaaagtgattaacagcgcattagagctgcttaatgaggtcggaatcgaaggtttaacaacccgtaaactcgcccagaagctaggtgtagagcagcctacattgtattggcatgtaaaaaataagcgagctctgctcgacgccttagccattgagatgatggataggcaccaaactcacttgtgccctttagaaggggaaagctggcaagattttttacgtaataatgctaaaagtatgagatgtgctttactaagccatcgcgatggagcaaaagtatgtttaggtacacgctggacagaacaattgtatgaagctgctgaaaatatgttagcctttttatgccaacaaggtttttcactagagaatgcattatatgcagtgagtgctgtgagggtgtttactttaggttgcgtattgtttgatcaagagagccaagtcgctaaagaagaaagggaaacacctactactgctagtatgccgccattagtgcgacaaggttgggaattaaaggatcaccaaggtgcagagccagccttcttattcggccttgaattgatcatatgcggattagaaaaacaacttaaatgcgaaagtgggtcttaa

SEQ ID NO: 607 - DNA, 627 bp, Artificial sequence
  SuR L6-6C11 CDS
atgggatctagattagataaaagtaaagtgattaacagcgcattagagctgcttaatgaggtcggaatcgaaggtttaacaacccgtaaactcgcccagaagctaggtgtagagcagcctacattgtattggcatgtaaaaaataagcgagctctgctcgacgccttagccattgagatgatggataggcaccaaactcactattgccctttagaaggggaaagctggcaagattttttacgtaatactgctaaaagtatgagatgtgctttactaagccatcgcgatggagcaaaagtatgtttaggtacacgctggacagaacaattgtatgaaactgctgaaaatcaattagcctttttatgccaacaaggtttttcactagagaatgcattatatgcaatgagtgctgtgagggtgtttactttaggttgcgtattgtttgatcaagagagccaagtcgctaaagaagaaagggaaacacctactactgctagtatgccgccattattgcgacaaggttgggaattaaaggatcaccaaggtgcagagccagccttcttattcggccttgaattgatcatatgcggattagaaaaacaacttaaatgcgaaagtgggtcttaa

SEQ ID NO: 608 - DNA, 627 bp, Artificial sequence
  SuR L6-6D02 CDS
atgggatctagattagataaaagtaaagtgattaacagcgcattagagctgcttaatgaggtcggaatcgaaggtttaacaacccgtaaactcgcccagaagctaggtgtagagcagcctacattgtattggcatgtaaaaaataagcgagctctgctcgacgccttagccattgagatgatggataggcaccaaactcactattgccctttagaaggggaaagctggcaagattttttacgtaatactgctaaaagtatgagatgtgctttactaagccatcgcgatggagcaaaagtatgtttaggtacacgctggacagaacaacattatgaagctgctgaaaatatgttagcctttttatgccaacaaggtttttcactagagaatgcattatatgcaatgagtgctgtgagggtgtttactttaggttgcgtattgtttgatcaagagagccaagtcgctaaagaagaaagggaaacacctactactgctagtatgccgccattattgcgacaagcttgggaattaaaggatcaccaaggtgcagagccagccttcttattgggccttgaattgatcatatgcggattagaaaaacaacttaaatgcgaaagtgggtcttaa

SEQ ID NO: 609 - DNA, 627 bp, Artificial sequence
  SuR L6-6D06 CDS
atgggatctagattagataaaagtaaagtgattaacagcgcattagagctgcttaatgaggtcggaatcgaaggtttaacaacccgtaaactcgcccagaagctaggtgtagagcagcctacattgtattggcatgtaaaaaataagcgagctctgctcgacgccttagccattgagatgatggataggcaccaaactcacatgtgccctttagaaggggaaagctggcaagattttttacgtaataatgctaaaagtatgagatgtgctttactaagccatcgcgatggagcaaaagtatgtttaggtacacgctggacagaaaaacaatatgaaggtgctgaaaatcaattagcctttttatgccaacaaggtttttcactagagaatgcattatatgcagtgagtgctgtgagggtgtttactttaggttgcgtattgtttgatcaagagagccaagtcgctaaagaagaaagggaaacacctactactgctagtatgccgccattagtgcgacaagtttgggaattaaaggatcaccaaggtgcagagccagccttcttattcggccttgaattgatcatatgcggattagaaaaacaacttaaatgcgaaagtgggtcttaa

SEQ ID NO: 610 - DNA, 627 bp, Artificial sequence
  SuR L6-6D07 CDS
atgggatctagattagataaaagtaaagtgattaacagcgcattagagctgcttaatgaggtcggaatcgaaggtttaacaacccgtaaactcgcccagaagctaggtgtagagcagcctacattgtattggcatgtaaaaaataagcgagctctgctcgacgccttagccatagagatgatggataggcaccaaactcacatttgccctttagaaggggaaagctggcaagattttttacgtaataatgctaaaagtatgagatgtgctttactaagccatcgcgatggagcaaaagtatgtttaggtacacgctggacagaacaacaatatgaaggtgctgaaaatcaattagcctttttatgccaacaaggtttttcactagagaatgcattatatgcaatgagtgctgtgagggtgtttactttaggttgcgtattgtttgatcaagagagccaagtcgctaaagaagaaagggaaacacctactactgctagtatgccgccattattgcgacaaggttgggaattaaaggatcaccaaggtgcagagccagccttcttattcggccttgaattgatcatatgcggattagaaaaacaacttaaatgcgaaagtgggtcttaa

SEQ ID NO: 611 - DNA, 627 bp, Artificial sequence
  SuR L6-6D09 CDS
atgggatctagattagataaaagtaaagtgattaacagcgcattagagctgcttaatgaggtcggaatcgaaggtttaacaacccgtaaactcgcccagaagctaggtgtagagcagcctacattgtattggcatgtaaaaaataagcgagctctgctcgacgccttagccattgagatgatggataggcacgcaactcacatgtgccctttagaaggggaaagctggcaagattttttacgtaataatgctaaaagtatgagatgtgctttactaagccatcgcgatggagcaaaagtatgtttaggtacacgctggacagaacaacattatgaaactgctgaaaatcaattagcctttttatgccaacaaggtttttcactagagaatgcattatatgcagtgagtgctgtgagggtgtttactttaggttgcgtattgtttgatcaagagagccaagtcgctaaagaagaaagggaaacacctactactgctagtatgccgccattattgcgacaaggttgggaattaaaggatcaccaaggtgcagagccagccttcttattcggccttgaattgatcatatgcggattagaaaaacaacttaaatgcgaaagtgggtcttaa

SEQ ID NO: 612 - DNA, 627 bp, Artificial sequence
  SuR L6-6D10 CDS
atgggatctagattagataaaagtaaagtgattaacagcgcattagagctgcttaatgaggtcggaatcgaaggtttaacaacccgtaaactcgcccagaagctaggtgtagagcagcctacattgtattggcatgtaaaaaataagcgagctctgctcgacgccttagccattgagatgatggataggcacgcaactcacatttgccctttagaaggggaaagctggcaagattttttacgtaataatgctaaaagtatgagatgtgctttactaagccatcgcgatggagcaaaagtatgtttaggtacacgctggacagaacaacaatatgaaactgctgaaaatatgttagcctttttatgccaacaaggtttttcactagagaatgcattatatgcagtgagtgctgtgagggtgtttactttaggttgcgtattgtttgatcaagagagccaagtcgctaaagaagaaagggaaacacctactactgctagtatgccgccattagtgcgacaagctttggaattaaaggatcaccaaggtgcagagccagccttcttattcggccttgaattgatcatatgcggattagaaaaacaacttaaatgcgaaagtgggtcttaa

SEQ ID NO: 613 - DNA, 627 bp, Artificial sequence
  SuR L6-6D12 CDS
atgggatctagattagataaaagtaaagtgattaacagcgcattagagctgcttaatgaggtcggaatcgaaggtttaacaacccgtaaactcgcccagaagctaggtgtagagcagcctacattgtattggcatgtaaaaaataagcgagctctgctcgacgccttagccattgagatgatggataggcacgcaactcacttttgccctttagaaggggaaagctggcaagattttttacgtaataatgctaaaagtatgagatgtgctttactaagccatcgcgatggagcaaaagtatggttaggtacacgctggacagaacaacaatatgaaactgctgaaaatatgttagcctttttatgccaacaaggtttttcactagagaatgcattatatgcagtgagtgctgtgagggtgtttactttaggttgcgtattgtttgatcaagagagacaagtcgctaaagaagaaagggaaacacctactactgctagtatgccgccattattgcgacaagtttgggaattaaaggatcaccaaggtgcagagccagccttcttattcggccttgaattgatcatatgcggattagaaaaacaacttaaatgcgaaagtgggtcttaa

SEQ ID NO: 614 - DNA, 627 bp, Artificial sequence
  SuR L6-6E01 CDS
atgggatctagattagataaaagtaaagtgattaacagcgcattagagctgcttaatgaggtcggaatcgaaggtttaacaacccgtaaactcgcccagaagctaggtgtagagcagcctacattgtattggcatgtaaaaaataagcgagctctgctcgacgccttagccattgagatgatggataggcaccaaactcacttttgccctttagaaggggaaagctggcaagattttttacgtaataatgctaaaagtatgagatgtgctttactaagccatcgcgatggagcaaaagtatgtttaggtacacgctggacagaacaacaatatgaagctgctgaaaatcaattagcctttttatgccaacaaggtttttcactagagaatgcattatatgcaatgagtgctgtgaggaactttactttaggttgcgtattgtttgatcaagagctccaagtcgctaaagaagaaagggaaacacctactactgctagtatgccgccattattgcgacaagtttgggaattaaaggatcaccaaggtgcagagccagccttcttattcggccttgaattgatcatatgcggattagaaaaacaacttaaatgcgaaagtgggtckkra

SEQ ID NO: 615 - DNA, 627 bp, Artificial sequence
  SuR L6-6E02 CDS
atgggatctagattagataaaagtaaagtgattaacagcgcattagagctgcttaatgaggtcggaatcgaaggtttaacaacccgtaaactcgcccagaagctaggtgtagagcagcctacattgtattggcatgtaaaaaataagcgagctctgctcgacgccttagccattgagatgatggataggcaccaaactcacgtttgccctttagaaggggaaagctggcaagattttttacgtaataatgctaaaagtatgagatgtgctttactaagccatcgcgatggagcaaaagtatgtttaggtacacgctggacagaacaaatgtatgaaactgctgaaaatatgttagcctttttatgccaacaaggtttttcactagagaatgcattatatgcaatgagtgctgtgagggtgtttactttaggttgcgtattgtttgatcaagagctccaagtcgctaaagaagaaagggaaacacctactactgctagtatgccgccattattgcgacaagcttgggaattaaaggatcaccaaggtgcagagccagccttcttattcggccttgaattgatcatatgcggattagaaaaacaacttaaatgcgaaagtgggtcttaa

SEQ ID NO: 616 - DNA, 627 bp, Artificial sequence
  SuR L6-6E03 CDS
  misc_feature (437)..(437): n is a, c, g, or t
  misc_feature (602)..(602): n is a, c, g, or t
atgggatctagattagataaaagtaaagtgattaacagcgcattagagctgcttaatgaggtcggaatcgaaggtttaacaacccgtaaactcgcccagaagctaggtgtagagcagcctacattgtattggcatgtaaaaaataagcgagctctgctcgacgccttagccattgagatgatggataggcaccaaactcactattgccctttagaaggggaaagctggcaagattttttacgtaataatgctaaaagtatgagatgtgctttactaagccatcgcgatggagcaaaagtatgtttaggtacacgctggacagaacaacattatgaaactgctgaaaatcaattagcctttttatgccaacaaggtttttcactagagaatgcattatatgcaatgagtgctgtgagggtgtttactttaggttgcgnattgtttgatcaagagagccaagtcgctaaagaagaaagggaaacacctactactgctagtatgccgccattagtgcgacaagtttgggaattaaaggatcaccaaggtgcagagccagccttcttattcggccttgaattgatcatatgcggattagaaaaacnacttaaatgcgaaagtgggtcttaa

SEQ ID NO: 617 - DNA, 627 bp, Artificial sequence
  SuR L6-6E11CDS
atgggatctagattagataaaagtaaagtgattaacagcgcattagagctgcttaatgaggtcggaatcgaaggtttaacaacccgtaaactcgcccagaagctaggtgtagagcagcctacattgtattggcatgtaaaaaataagcgagctctgctcgacgccttagccattgagatgatggataggcaccaaactcactattgccctttagaaggggaaagctggcaagattttttacgtaatactgctaaaagtatgagatgtgctttactaagccatcgcgatggagcaaaagtatgtttaggtacacgctggacagaacaacattatgaaggtgctgaaaatatgttagcctttttatgccaacaaggtttttcactagagaatgcattatatgcagtgagtgctgtgagggtgtttactttaggttgcgtattgtttgatcaagagctccaagtcgctaaagaagaaagggaaacacctactactgctagtatgccgccattagtgcgacaaggttgggaattaaaggatcaccaaggtgcagagccagccttcttattcggccttgaattgatcatatgcggattagaaaaacaacttaaatgcgaaagtgggtcttaa

SEQ ID NO: 618 - DNA, 627 bp, Artificial sequence
  SuR L6-6F03 CDS
atgggatctagattagataaaagtaaagtgattaacagcgcattagagctgcttaatgaggtcggaatcgaaggtttaacaacccgtaaactcgcccagaagctaggtgtagagcagcctacattgtattggcatgtaaaaaataagcgagctctgctcgacgccttagccattgagatgatggataggcaccaaactcacgtttgccctttagaaggggaaagctggcaagattttttacgtaataatgctaaaagtatgagatgtgctttactaagccatcgcgatggagcaaaagtatgtttaggtacacgctggacagaacaacaatatgaagctgctgaaaatcaattagcctttttatgccaacaaggtttttcactagagaatgcattatatgcaatgagtgctgtgagggtgtttactttaggttgcgtattgtttgatcaagagctccaagtcgctaaagaagaaagggaaacacctactactgctagtatgccgccattattgcgacaagtttgggaattaaaggatcaccaaggtgcagagccagccttcttattcggccttgaattgatcatatgcggattagaaaaacaacttaaatgcgaaagtgggtcttaa

SEQ ID NO: 619 - DNA, 627 bp, Artificial sequence
  SuR L6-6F07 CDS
atgggatctagattagataaaagtaaagtgattaacagcgcattagagctgcttaatgaggtcggaatcgaaggtttaacaacccgtaaactcgcccagaagctaggtgtagagcagcctacattgtattggcatgtaaaaaataagcgagctctgctcgacgccttagccattgagatgatggataggcacgcaactcacttgtgccctttagaaggggaaagctggcaagattttttacgtaatactgctaaaagtatgagatgtgctttactaagccatcgcgatggagcaaaagtatgtttaggtacacgctggacagaacaacaatatgaaagtgctgaaaatatgttagcctttttatgccaacaaggtttttcactagagaatgcattatatgcaatgagtgctgtgagggtgtttactttaggttgcgtattgtttgatcaagagagccaagtcgctaaagaagaaagggaaacacctactactgctagtatgccgccattattgcgacaagcttgggaattaaaggatcaccaaggtgcagagccagccttcttattcggccttgaattgatcatatgcggattagaaaaacaacttaaatgcgaaagtgggtcttaa

SEQ ID NO: 620 - DNA, 627 bp, Artificial sequence
  SuR L6-6F08 CDS
atgggatctagattagataaaagtaaagtgattaacagcgcattagagctgcttaatgaggtcggaatcgaaggtttaacaacccgtaaactcgcccagaagctaggtgtagagcagcctacattgtattggcatgtaaaaaataagcgagctctgctcgacgccttagccattgagatgatggataggcaccaaactcactattgccctttagaaggggaaagctggcaagattttttacgtaatactgctaaaagtatgagatgtgctttactaagccatcgcgatggagcaaaagtatgtttaggtacacgctggacagaacaacaatatgaaagtgctgaaaatcaattagcctttttatgccaacaaggtttttcactagagaatgcattatatgcagtgagtgctgtgagggtgtttactttaggttgcgtattgtttgatcaagagctccaagtcgctaaagaagaaagggaaacacctactactgctagtatgccgccattattgcgacaagtttgggaattaaaggatcaccaaggtgcagagccagccttcttattcggccttgaattgatcatatgcggattagaaaaacaacttaaatgcgaaagtgggtcttaa

SEQ ID NO: 621 - DNA, 627 bp, Artificial sequence
  SuR L6-6G01 CDS
atgggatctagattagataaaagtaaagtgattaacagcgcattagagctgcttaatgaggtcggaatcgaaggtttaacaacccgtaaactcgcccagaagctaggtgtagagcagcctacattgtattggcatgtaaaaaataagcgagctctgctcgacgccttagccattgagatgatggataggcacgcaactcacgtttgccctttagaaggggaaagctggcaagattttttacgtaatactgctaaaagtatgagatgtgctttactaagccatcgcgatggagcaaaagtatgtttaggtacacgctggacagaacaacaatatgaaactgctgaaaatatgttagcctttttatgccaacaaggtttttcactagagaatgcattatatgcaatgagtgctgtgagggtgtttactttaggttgcgtattgtttgatcaagagagccaagtcgctaaagaagaaagggaaacacctactactgctagtatgccgccattattgcgacaagtttgggaattaaaggatcaccaaggtgcagagccagccttcttattcggccttgaattgatcatatgcggattagaaaaacaacttaaatgcgaaagtgggtcttaa

SEQ ID NO: 622 - DNA, 627 bp, Artificial sequence
  SuR L7-1A01 CDS
atgggatctagattagataaaagtaaagtgattaacagcgcattagagctgcttaatgaggtcggaatcgaaggtttaacaacccgtaaactcgcccagaagctaggtgtagagcagcctacattgtattggcatgtaaaaaataagcgagctctgctcgacgcattggccattgagatgctggataggcacgcgactcactattgccctttagaaggggaaagctggcaagattttttacgtaataacgctaaaagtatgagatgtgctttactaagtcatcgcgatggagcaaaagtatgtttaggtacaggctttacagaaaagcaatatgaaactgccgaaaatagtctggcctttttatgccaacaaggtttttcactcgagcacgcaatgtatgcaatgcaggctgctggtatttatactttaggttgcgtattgttggatcaagagcttcaagtcgctaaagaagaaagggaaacacctactactgatagtatgccgccattagtccgacaagttctggaattaaaggatcaccaaggtgcagagccagccttcttattcggccttgaattgatcatatgcggattagaaaaacaacttaaatgtgaaagtgggtcttaa

SEQ ID NO: 623 - DNA, 627 bp, Artificial sequence
  SuR L7-1B01 Cds
atgggatctagattagataaaagtaaagcgattaacagcgcattagagctgcttaatgaggtcggaatcgaaggtttaacaacccgtaaactcgcccagaagctaggtgtagagcagcctacattgtattggcatgtaaaaaataagcgagctctgctcgacgcaatggccattgagatgctggataggcacgcgactcactattgccctttagaaggggaaagctggcaagattttttacgtaataacgctaaaagtatgagatgtgctttactaagtcatcgcgatggagcaaaagtatgtttaggtacaggctttacagaacagcaatatgaagctgccgaaaatagtatggcctttttatgccaacaaggtttttcactagagcacgcactgtatgcaatgcaggctgctggtatttttactttaggttgcgtattgttggatcaagagcttcaagtcgctaaagaagaaagggaaacacctactactgatagtatgccgccattagtccgacaagttctggaattaaaggatcaccaaggtgcagagccagccttcttattcggccttgaattgatcatatgcggattagaaaaacaacttaaatgtgaaagtgggtcttaa

SEQ ID NO: 624 - DNA, 627 bp, Artificial sequence
  SuR L7-1C01 CDS
atgggatctagattagataaaagtaaagtgattaacagcgcattagagctgcttaatgaggtcggaatcgaaggtttaacaacccgtaaactcgcccagaagctaggtgtagagcagcctacattgtattggcatgtaaaaaataagcgagctctgctcgacgcattggccattgagatgctggataggcacgcgactcactattgccctttagaaggggaaagctggcaagattttttacgtaataacgctaaaagtatgagatgtgctttactaagtcatcgcgatggagcaaaagtatgtttaggtacaggctttacagaacagatgtatgaagctgccgaaaatagtatggcctttttatgccaacaaggtttttcactagagcacgcaatgtatgcaatgcaggctgttggtatttatactttaggttgcgtattgttggatcaagagcttcaagtcgctaaagaagaaagggaaacacctactactgatagtatgccgccattagtccgacaagttctggaattaaaggatcaccaaggtgcagagccagccttcttattcggccttgaattgatcatatgcggattagaaatacaacttaaatgtgaaagtgggtcttaa

SEQ ID NO: 625 - DNA, 627 bp, Artificial sequence
  SuR L7-1D01 CDS
atgggatctagattagataaaagtaaagygattaacagcgcattagagctgcttaatgaggtcggaatcgaaggtttaacaacccgtaaactcgcccagaagctaggtgtagagcagcctacattgtattggcatgtaaaaaataagcgagctctgctcgacgcaatggccattgagatgctggataggcacgcgactcactattgccctttagaaggggaaagctggcaagattttttacgtaataacgctaaaagtatgagatgtgctttactaagtcatcgcgatggagcaaaagtatgtttaggtacaggctttacagaacagcaatatgaaactgccgaaaatagtctggcctttttatgccaacaaggtttttcactagagaacgcactgtatgcaatgcaggctgttggtatttatactttaggttgcgtattgttggatcaagagcttcaagtcgctaaagaagaaagggaaacacctactactgatagtatgccgccattagtccgacaagttctggaattaaaggatcaccaaggtgcagagccagccttcttattcggccttgaattgatcatatgcggattagaaaaacaacttaaatgtgaaagtgggtcttaa

SEQ ID NO: 626 - DNA, 627 bp, Artificial sequence
  SuRL7-1E01 CDS
  misc_feature (27)..(27): n is a, c, g, or t
atgggatctagattagataaaagtaanccgattaacagcgcattagagctgcttaatgaggtcggaatcgaaggtttaacaacccgtaaactcgcccagaagctaggtgtagagcagcctacattgtattggcatgtaaaaaataagcgagctctgctcgacgcattggccattgagatgctggataggcacgcgactcactattgccctttagaaggggaaagctggcaagattttttacgtaataacgctaaaagtatgagatgtgctttactaagtcatcgcgatggagcaaaagtatgtttaggtacaggctttacagaacagcaatatgaaagtgccgaaaatagtatggcctttttatgccaacaaggtttttcactagagcacgcactgtatgcaatgcaggctgttggtatttttactttaggttgcgtattgttggatcaagagcttcaagtcgctaaagaagaaagggaaacacctactactgatagtatgccgccattactccgacaagctctggaattaaaggatcaccaaggtgcagagccagccttcttattcggccttgaattgatcatatgcggattagaaaaacaacttaaatgtgaaagtgggtcttaa

SEQ ID NO: 627 - DNA, 627 bp, Artificial sequence
  SuR L7-1F01 CDS
atgggatctagattagataaaagtaaagtgattaacagcgcattagagctgcttaatgaggtcggaatcgaaggtttaacaacccgtaaactcgcccagaagctaggtgtagagcagcctacattgtattggcatgtaaaaaataagcgagctctgctcgacgcaatggccattgagatgctggataggcacgcgactcacatctgccctttagaaggggaaagctggcaagattttttacgtaataacgctaaaagtatgagatgtgctttactaagtcatcgcgatggagcaaaagtatgtttaggtacaggctttacagaacagcaatatgaaagtgccgaaaatagtatggcctttttatgccaacaaggtttttcactagagaacgcaatgtatgcaatgcaggctgttggtatttttactttaggttgcgtattgttggatcaagagcttcaagtcgctaaagaagaaagggaaacacctactactgatagtatgccgccattagtccgacaagttctggaattaaaggatcaccaaggtgcagagccagccttcttattcggccttgaattgatcatatgcggattagaaaaacaacttaaatgtgaaagtgggtcttaa

SEQ ID NO: 628 - DNA, 627 bp, Artificial sequence
  SuR L7-1G01 CDS
atgggatctagattagataaaagtaaagtgattaacagcgcattagagctgcttaatgaggtcggaatcgaaggtttaacaacccgtaaactcgcccagaagctaggtgtagagcagcctacattgtattggcatgtaaaaaataagcgagctctgctcgacgcaatggccattgagatgctggataggcacgcgactcacgtctgccctttagaaggggaaagctggcaagattttttacgtaataacgctaaaagtatgagatgtgctttactaagtcatcgcgatggagcaaaagtatgtttaggtacaggctttacagaacagcaatatgaaactgccgaaaatagtatggcctttttatgccaacaaggtttttcactagagaacgcaatgtatgcaatgcaggctgttggtatttttactttaggttgcgtattgttggatcaagagcttcaagtcgctaaagaagaaagggaaacacctactactgatagtatgccgccattagtccgacaagctctggaattaaaggatcaccaaggtgcagagccagccttcttattcggccttgaattgatcatatgcggattagaaaaacaacttaaatgtgaaagtgggtcttaa

SEQ ID NO: 629 - DNA, 627 bp, Artificial sequence
  SuR L7-1C02 CDS
atgggatctagattagataaaagtaaagtgattaacagcgcattagagctgcttaatgaggtcggaatcgaaggtttaacaacccgtaaactcgcccagaagctaggtgtagagcagcctacattgtattggcatgtaaaaaataagcgagctctgctcgacgcaatggccattgagatgctggataggcacgcgactcactattgccctttagaaggggaaagctggcaagattttttacgtaataacgctaaaagtatgagatgtgctttactaagtcatcgcgatggagcaaaagtatgtttaggtacaggctttacagaacagatgtatgaaactgccgaaaatagtatggcctttttatgccaacaaggtttttcactagagcacgcactgtatgcaatgcaggctgttggtatttatactgtaggttgcgtattgttggatcaagagcttcaagtcgctaaagaagaaagggaaacacctactactgatagtatgccgccattagtccgacaaggtcttgaattaaaggatcaccaaggtgcagagccagccttcttattcggccttgaattgatcatatgcggattagaaaaacaacttaaatgtgaaagtgggtcttaa

SEQ ID NO: 630 - DNA, 627 bp, Artificial sequence
  SuR L7-1D02 CDS
  misc_feature (330)..(330): n is a, c, g, or t
atgggatctagattagataaaagtaaagcgattaacagcgcattagagctgcttaatgaggtcggaatcgaaggtttaacaacccgtaaactcgcccagaagctaggtgtagagcagcctacattgtattggcatgtaaaaaataagcgagctctgctcgacgcaatggccattgagatgctggataggcacgcgactcactattgccctttagaaggggaaagctggcaagattttttacgtaataacgctaaaagtatgagatgtgctttactaagtcatcgcgatggagcaaaagtatgtttaggtacaggctttacagaacagcantatgaagctgccgaaaatagtatggcctttttatgccaacaaggtttttcactagagaacgcaatgtatgcaatgcaggctgttggtatttatactttaggttgcgtattgttggatcaagagcttcaagtcgctaaagaagaaagggaaacacctactactgatagtatgccgccattagtccgacaagttctggaattaaaggatcaccaaggtgcagagccagccttcttattcggccttgaattgatcatatgcggattagaaaaacaacttaaatgtgaaagtgggtcttaa

SEQ ID NO: 631 - DNA, 627 bp, Artificial sequence
  SuR L7-1E02 CDS
  misc_feature (166)..(166): n is a, c, g, or t
  misc_feature (329)..(330): n is a, c, g, or t
  misc_feature (413)..(413): n is a, c, g, or t
  misc_feature (415)..(415): n is a, c, g, or t
atgggatctagattagataaaagtaaagtgattaacagcgcattagagctgcttaatgaggtcggaatcgaaggtttaacaacccgtaaactcgcccagaagctaggtgtagagcagcctacattgtattggcatgtaaaaaataagcgagctctgctcgacgcantggccattgagatgctggataggcacgcgactcactattgccctttagaaggggaaagctggcaagattttttacgtaataacgctaaaagtatgagatgtgctttactaagtcatcgcgatggagcaaaagtatgtttaggtacaggctttacagaacagcnntatgaaactgccgaaaatagtctggcctttttatgccaacaaggtttttcactagagaacgcaatgtatgcaatgcaggctgntngtatttatactttaggttgcgtattgttggatcaagagcttcaagtcgctaaagaagaaagggaaacacctactactgatagtatgccgccattagtccgacaagctctggaattaaaggatcaccaaggtgcagagccagccttcttattcggccttgaattgatcatatgcggattagaaaaacaacttaaatgtgaaagtgggtcttaa

SEQ ID NO: 632 - DNA, 627 bp, Artificial sequence
  SuR L7-1F02 CDS
atgggatctagattagataaaagtaaagtgattaacagcgcattagagctgcttaatgaggtcggaatcgaaggtttaacaacccgtaaactcgcccagaagctaggtgtagagcagcctacattgtattggcatgtaaaaaataagcgagctctgctcgacgcaatggccattgagatgctggataggcacgcgactcactatggccctttagaaggggaaagctggcaagattttttacgtaataacgctaaaagtatgagatgtgctttactaagtcatcgcgatggagcaaaagtatgtttaggtacaggctttacagaacagcaatatgaaactgccgaaaatagtatggcctttttatgccaacaaggtttttcactagagaacgcaatgtatgcaatgcaggctgtttgtatttatactttaggttgcgtattgttggatcaagagcttcaagtcgctaaagaagaaagggaaacacctactacagatagtatgccgccattagtccgacaagttctggaattaaaggatcaccaaggtgcagagccagccttcttattcggccttgaattgatcatatgcggattagaaaaacaacttaaatgtgaaagtgggtcttaa

SEQ ID NO: 633 - DNA, 627 bp, Artificial sequence
  SuR L7-1G02 CDS
atgggatctagattagataaaagtaaagygattaacagcgcattagagctgcttaatgaggtcggaatcgaaggtttaacaacccgtaaactcgcccagaagctaggtgtagagcagcctacattgtattggcatgtaaaaaataagcgagctctgctcgacgcaatggccattgagatgctggataggcacgcgactcactattgccctttagaaggggaaagctggcaagattttttacgtaataacgctaaaagtatgagatgtgctttactaagtcatcgcgatggagcaaaagtatgtttaggtacaggctttacagaaaagatgtatgaaggtgccgaaaatagtatggcctttttatgccaacaaggtttttcactagagcacgcaatgtatgcaatgcaggctgctggtatttttactttaggttgcgtattgttggatcaagagcttcaagtcgctaaagaagaaagggaaacacctactactgatagtatgccgccattagtccgacaagctctggaattaaaggatcaccaaggtgcagagccagccttcttattcggccttgaattgatcatatgcggattagaaaaacaacttaaatgtgaaagtgggtcttaa

SEQ ID NO: 634 - DNA, 627 bp, Artificial sequence
  SuR L7-1H02 CDS
atgggatctagattagataaaagtaaagtgattaacagcgcattagagctgcttaatgaggtcggaatcgaaggtttaacaacccgtaaactcgcccagaagctaggtgtagagcagcctacattgtattggcatgtaaaaaataagcgagctctgctcgacgcaatggccattgagatgctggataggcacgcgactcactattgccctttagaaggggaaagctggcaagattttttacgtaataacgctaaaagtatgagatgtgctttactaagtcatcgcgatggagcaaaagtatgtttaggtacaggctttacagaacagcaatatgaaactgccgaaaatagtctggcctttttatgccaacaaggtttttcactagagcacgcaatgtatgcaatgcaggctgttggtatttttactttaggttgcgtattgttggatcaagagcttcaagtcgctaaagaagaaagggaaacacctactactgatagtatgccgccattagtccgacaagctctggaattaaaggatcaccaaggtgcagagccagccttcttattcggccttgaattgatcatatgcggattagaaaaacaacttaaatgtgaaagtgggtcttaa

SEQ ID NO: 635 - DNA, 627 bp, Artificial sequence
  SuR L7-1C03 CDS
atgggatctagattagataaaagtaaagcgattaacagcgcattagagctgcttaatgaggtcggaatcgaaggtttaacaacccgtaaactcgcccagaagctaggtgtagagcagcctacattgtattggcatgtaaaaaataagcgagctctgctcgacgcaatggccattgagatgctggataggcacgcgactcacgtctgccctttagaaggggaaagctggcaagattttttacgtaataacgctaaaattatgagatgtgctttactaagtcatcgcgatggagcaaaagtatgtttaggtacaggctttacagaacagcaatatgaaactgccgaaaatagtctggcctttttatgccaacaaggtttttcactagagcacgcactgtatgcaatgcaggctgctggtatttttactttaggttgcgtattgttggatcaagagcttcaagtcgctaaagaagaaagggaaacacctactactgatagtatgccgccattagtccgacaagctctggaattaaatgatcaccaaggtgcagagccagccttcttattcggccttgaattgatcatatgcggattagaaaaacaacttaaatgtgaaagtgggtcttaa

SEQ ID NO: 636 - DNA, 627 bp, Artificial sequence
  SuR L7-1E03 CDS
atgggatctagattagataaaagtaaagcgattaacagcgcattagagctgcttaatgaggtcggaatcgaaggtttaacaacccgtaaactcgcccagaagctaggtgtagagcagcctacattgtattggcatgtaaaaaataagcgagctctgctcgacgcattggccattgagatgctggataggcacgcgactcactattgccctttagaaggggaaagctggcaagattttttacgtaataacgctaaaagtatgagatgtgctttactaagtcatcgcgatggagcaaaagtatgtttaggtacaggctttacagaacagatgtatgaaactgccgaaaatagtatggcctttttatgccaacaaggtttttcactagagaacgcaatgtatgcaatgcaggctgctggtatttatactttaggttgcgtattgttggatcaagagcttcaagtcgctaaagaagaaagggaaacacctactactgatagtatgccgccattagtccgacaagttctggaattaaaggatcaccaaggtgcagagccagccttcttattcggccttgaattgatcatatgcggattagaaaaacaacttaaatgtgaaagtgggtcttaa

SEQ ID NO: 637 - DNA, 627 bp, Artificial sequence
  SuR L7-1A04 CDS
atgggatctagattagataaaagtaaagtgattaacagcgcattagagctgcttaatgaggtcggaatcgaaggtttaacaacccgtaaactcgcccagaagctaggtgtagagcagcctacattgtattggcatgtaaaaaataagcgagctctgctcgacgcaatggccattgagatgctggataggcacgcgactcactattgccctttagaagggaaaagctggcaagattttttacgtaataacgctaaaagtatgagatgtgctttactaagtcatcgcgatggagcaaaagtatgtttaggtacaggctttacagaacagcaatatgaaagtgccgaaaatagtatggcctttttatgccaacaaggtttttcactagagcacgcaatgtatgcaatgcaggctgctggtatttttactttaggttgcgtattgttggatcaagagcttcaagtcgctaaagaagaaagggaaacacctactactgatagtatgccgccattactccgacaagctctggaattaaaggatcaccaaggtgcagagccagccttcttattcggccttgaattgatcatatgcggattagaaaaacaacttaaatgtgaaagtgggtcttaa

SEQ ID NO: 638 - DNA, 627 bp, Artificial sequence
  SuR L7-1C04 CDS
atgggatctagattagataaaagtaaagygattaacagcgcattagagctgcttaatgaggtcggaatcgaaggtttaacaacccgtaaactcgcccagaagctaggtgtagagcagcctacattgtattggcatgtaaaaaataagcgagctctgctcgacgcattggccattgagatgctggataggcacgcgactcactattgccctttagaaggggaaagctggcaagattttttacgtaataacgctaaaagtatgagatgtgctttactaagtcatcgcgatggagcaaaagtatgtttaggtacaggctttacagaacagatgtatgaaagtgccgaaaatagtctggcctttttatgccaacaaggtttttcactagagcacgcaatgtatgcaatgcaggctgctggtatttatactttaggttgcgtattgttggatcaagagcttcaagtcgctaaagaagaaagggaaacacctactactgatagtatgccgccattagtccgacaaggtctggaattaaaggatcaccaaggtgcagagccagccttcttattcggccttgaattgatcatatgcggattagaaaaacaacttaaatgtgaaagtgggtcttaa

SEQ ID NO: 639 - DNA, 627 bp, Artificial sequence
  SuR L7-1D04 CDS
atgggatctagattagataaaagtaaagcgattaacagcgcattagagctgcttaatgaggtcggaatcgaaggtttaacaacccgtaaactcgcccagaagctaggtgtagagcagcctacattgtattggcatgtaaaaaataagcgagctctgctcgacgcaatggccattgagatgctggataggcacgcgactcactattgccctttagaaggggaaagctggcaagattttttacgtaataacgctaaaagtatgagatgtgctttactaagtcatcgcgatggagcaaaagtatgtttaggtacaggctttacagaacagcaatatgaaggtgccgaaaatagtatggcctttttatgccaacaaggtttttcactagagaacgcaatgtatgcaatgcaggctgttggtatttttactttaggttgcgtattgttggatcaagagcttcaagtcgctaaagaagaaagggaaacacctactactgatagtatgccgccattagtccgacaaggtctggaattaaaggatcaccaaggtgcagagccagccttcttattcggccttgaattgatcatatgcggattagaaaaacaacttaaatgtgaaagtgggtcttaa

SEQ ID NO: 640 - DNA, 627 bp, Artificial sequence
  SuR L7-1E04 CDS
atgggatctagattagataaaagtaaagygattaacagcgcattagagctgcttaatgaggtcggaatcgaaggtttaacaacccgtaaactcgcccagaagctaggtgtagagcagcctacattgtattggcatgtaaaaaataagcgagctctgctcgacgcaatggccattgagatgctggataggcacgcgactcactattgccctttagaaggggaaagctggcaagattttttacgtaataacgctaaaagtatgagatgtgctttactaagtcatcgcgatggagcaaaagtatgtttaggtacaggctttacagaacagcaatatgaaactgccgaaaatagtctggcctttttatgccaacaaggtttttcactagagcacgcactgtatgcaatgcaggctgttggtatttatactttaggttgcgtattgttggatcaagagcttcaagtcgctaaagaagaaagggaaacacctactactgatagtatgccgccattagctcgacaagctctggaattaaaggatcaccaaggtgcagagccagccttcttattcggccttgaattgatcatatgcggattagaaaaacaacttaaatgtgaaagtgggtcttaa

SEQ ID NO: 641 - DNA, 627 bp, Artificial sequence
  SuR L7-1F04 CDS
atgggatctagattagataaaagtaaagygattaacagcgcattagagctgcttaatgaggtcggaatcgaaggtttaacaacccgtaaactcgcccagaagctaggtgtagagcagcctacattgtattggcatgtaaaaaataagcgagctctgctcgacgcattggccattgagatgctggataggcacgcgactcactattgccctttagaaggggaaagctggcaagattttttacgtaataacgctaaaagtatgagatgtgctttactaagtcatcgcgatggagcaaaagtatgtttaggtacaggctttacagaacagcactatgaaactgccgaaaatagtatggcctttttatgccaacaaggtttttcactagagaacgcactgtatgcaatgcaggctgttggtatttttactttaggttgcgtattgttggatcaagagcttcaagtcgctaaagaagaaagggaaacacctactactgatagtatgccgccattagtccgacaagctctggaattaaaggatcaccaaggtgcagagccagccttcttattcggccttgaattgatcatatgcggattagaaaaacaacttaaatgtgaaagtgggtcttaa

SEQ ID NO: 642 - DNA, 627 bp, Artificial sequence
  SuR L7-1G04 CDS
  misc_feature (29)..(29): n is a, c, g, or t
atgggatctagattagataaaagtaaagngattaacagcgcattagagctgcttaatgaggtcggaatcgaaggtttaacaacccgtaaactcgcccagaagctaggtgtagagcagcctacattgtattggcatgtaaaaaataagcgagctctgctcgacgcaatggccattgagatgctggataggcacgcgactcactattgccctttagaaggggaaagctggcaagattttttacgtaataacgctaaaagtatgagatgtgctttactaagtcatcgcgatggagcaaaagtatgtttaggtacaggctttacagaacagcaatatgaaagtgccgaaaatagtatggcctttttatgccaacaaggtttttcactagagaacgcaatgtatgcaatgcaggctgttggtatttatactttaggttgcgtattgttggatcaagagcttcaagtcgctaaagaagaaagggaaacacctactactgatagtatgccgccattactccgacaagttctggaattaaaggatcaccaaggtgcagagccagccttcttattcggccttgaattgatcatatgcggattagaaaaacaacttaaatgtgaaagtgggtcttaa

SEQ ID NO: 643 - DNA, 627 bp, Artificial sequence
  SuR L7-1H04 CDS
atgggatctagattagataaaagtaaagygattaacagcgcattagagctgcttaatgaggtcggaatcgaaggtttaacaacccgtaaactcgcccagaagctaggtgtagagcagcctacattgtattggcatgtaaaaaataagcgagctctgctcgacgcattggccattgagatgctggataggcacgcgactcactattgccctttagaaggggaaagctggcaagattttttacgtaataacgctaaaagtatgagatgtgctttactaagtcatcgcgatggagcaaaagtatgtttaggtacaggctttacagaaaagcaatatgaagctgccgaaaatagtctggcctttttatgccaacaaggtttttcactagagcacgcactgtatgcaatgcaggctgctggtatttatactttaggttgcgtattgttggatcaagagcttcaagtcgctaaagaagaaagggaaacacctactactgatagtatgccgccattagtccgacaagctctggaattaaaggatcaccaaggtgcagagccagccttcttattcggccttgaattgatcatatgcggattagaaaaacaacttaaatgtgaaagtgggtcttaa

SEQ ID NO: 644 - DNA, 627 bp, Artificial sequence
  SuR L7-1A05 CDS
atgggatctagattagataaaagtaaagtgattaacagcgcattagagctgcttaatgaggtcggaatcgaaggtttaacaacccgtaaactcgcccagaagctaggtgtagagcagcctacattgtattggcatgtaaaaaataagcgagctctgctcgacgcaatggccattgagatgctggataggcacgcgactcactattgccctttagaaggggaaagctggcaagattttttacgtaataacgctaaaagtatgagatgtgctttactaagtcatcgcgatggagcaaaagtatgtttaggtacaggctttacagaacagcactatgaaactgccgaaaatagtatggcctttttatgccaacaaggtttttcactagagcacgcactgtatgcaatgcaggctgctggtatttatactttaggttgcgtattgttggatcaagagcttcaagtcgctaaagaagaaagggaaacacctactactgatagtatgccgccattagtccgacaagctctggaattaaaggatcaccaaggtgcagagccagccttcttattcggccttgaattgatcatatgcggattagaaaaacaacttaaatgtgaaagtgggtcttaa

SEQ ID NO: 645 - DNA, 627 bp, Artificial sequence
  SuR L7-1C05 CDS
atgggatctagattagataaaagtaaagygattaacagcgcattagagctgcttaatgaggtcggaatcgaaggtttaacaacccgtaaactcgcccagaagctaggtgtagagcagcctacattgtattggcatgtaaaaaataagcgagctctgctcgacgcaatggccattgagatgctggataggcacgcgacacactattgccctttagaaggggaaagctggcaagattttttacgtaataacgctaaaagtatgagatgtgctttactaagtcatcgcgatggagcaaaagtatgtttaggtacaggctttacagaacagcactatgaaactgccgaaaatagtatggcctttttatgccaacaaggtttttcactagagaacgcaatgtatgcaatgcaggctgttggtatttatactttaggttgcgtattgttggatcaagagcttcaagtcgctaaagaagaaagggaaacacctactactgatagtatgccgccattagtccgacaagctctggaattaaaggatcaccaaggtgcagagccagccttcttattcggccttgaattgatcatatgcggattagaaaaacaacttaaatgtgaaagtgggtcttaa

SEQ ID NO: 646 - DNA, 627 bp, Artificial sequence
  SuR L7-1E05 CDS
atgggatctagattagataaaagtaaagtgattaacagcgcattagagctgcttaatgaggtcggaatcgaaggtttaacaacccgtaaactcgcccagaagctaggtgtagagcagcctacattgtattggcatgtaaaaaataagcgagctctgcttgacgcaatggccattgagatgctggataggcacgcgactcactattgccctttagaaggggaaagctggcaagattttttacgtaataacgctaaaagtatgagatgtgctttactaagtcatcgcgatggagcaaaagtatgtttaggtacaggctttacagaacagcaatatgaaactgccgaaaatagtatggcctttttatgcaaacaaggtttttcactagagaacgcaatgtatgcaatgcaggctgttggtatttatactttaggttgcgtattgttggatcaagagcttcaagtcgctaaagaagaaagggaaacacctactactgatagtatgccgccattagtccgacaagttctggaattaaaggatcaccaaggtgcagagccagccttcttattcggccttgaattgatcatatgcggattagaaaaacaacttaaatgtgaaagtgggtcttaa

SEQ ID NO: 647 - DNA, 627 bp, Artificial sequence
  SuR L7-1F05 CDS
  misc_feature (166)..(166): n is a, c, g, or t
  misc_feature (338)..(338): n is a, c, g, or t
  misc_feature (352)..(352): n is a, c, g, or t
  misc_feature (521)..(521): n is a, c, g, or t
atgggatctagattagataaaagtaaagtgattaacagcgcattagagctgcttaatgaggtcggaatcgaaggtttaacaacccgtaaactcgcccagaagctaggtgtagagcagcctacattgtattggcatgtaaaaaataagcgagctctgctcgacgcantggccattgagatgctggataggcacgcgactcactattgccctttagaaggggaaagctggcaagattttttacgtaataacgctaaaagtatgagatgtgctttactaagtcatcgcgatggagcaaaagtatgtttaggtacaggctttacagaacagcactatgaaantgccgaaaatagtntggcctttttatgccaacaaggtttttcactagagcacgcactgtatgcaatgcaggctgttggtatttatactttaggttgcgtattgttggatcaagagcttcaagtcgctaaagaagaaagggaaacacctactactgatagtatgccgccattagtccgacaagntctggaattaaaggatcaccaaggtgcagagccagccttcttattcggccttgaattgatcatatgcggattagaaaaacaacttaaatgtgaaagtgggtcttaa

SEQ ID NO: 648 - DNA, 627 bp, Artificial sequence
  SuR L7-1A06 CDS
atgggatctagattagataaaagtaaagtgattaacagcgcattagagctgcttaatgaggtcggaatcgaaggtttaacaacccgtaaactcgcccagaagctaggtgtagagcagcctacattgtattggcatgtaaaaaataagcgagctctgctcgacgcattggccattgagatgctggataggcacgcgactcactattgccctttagaaggggaaagctggcaagattttttacgtaataacgctaaaagtatgagatgtgctttactaagtcatcgcgatggagcaaaagtatgtttaggtacaggctttacagaacagcactatgaaagtgccgaaaatagtctggcctttttatgccaacaaggtttttcactagagaacgcaatgtatgcaatgcaggctgttggtatttttactttaggttgcgtattgttggatcaagagcttcaagtcgctaaagaagaaagggaaacacctactactgatagtatgccgccattagtccgacaagttctggaattaaaggatcaccaaggtgcagagccagccttcttattcggccttgaattgatcatatgcggattagaaaaacaacttaaatgtgaaagtgggtcttaa

SEQ ID NO: 649 - DNA, 627 bp, Artificial sequence
  SuR L7-1B06 CDS
atgggatctagattagataaaagtaaagcgattaacagcgcattagagctgcttaatgaggtcggaatcgaaggtttaacaacccgtaaactcgcccagaagctaggtgtagagcagcctacattgtattggcatgtaaaaaataagcgagctctgctcgacgcaatggccattgagatgctggataggcacgcgactcactattgccctttagaaggggaaagctggcaagattttttacgtaataacgctaaaagtatgagatgtgctttactaagtcatcgcgatggagcaaaagtatgtttaggtacaggctttacagaacagcaatatgaaactgccgaaaatagtctggcctttttatgccaacaaggtttttcactagagaacgcactgtatgcaatgcaggctgttggtatttatactttaggttgcgtattgttggatcaagagcttcaagtcgctaaagaagaaagggaaacacctactactgatagtatgccgccattagtccgccaagttctggaattaaaggatcaccaaggtgcagagccagccttcttattcggccttgaattgatcatatgcggattagaaaaacaacttaaatgtgaaagtgggtcttaa

SEQ ID NO: 650 - DNA, 627 bp, Artificial sequence
  SuR L7-1D06 CDS
atgggatctagattagataaaagtaaagtgattaacagcgcattagagctgcttaatgaggtcggaatcgaaggtttaacaacccgtaaactcgcccagaagctaggtgtagagcagcctacattgtattggcatgtaaaaaataagcgagctctgctcgacgcaatggccattgagatgctggataggcacgcgactcactattgccctttagaaggggaaagctggcaagattttttacgtaataacgctaaaagtatgagatgtgctttactaagtcatcgcgatggagcaaaagtatgtttaggtacaggctttacagaacagcaatatgaagctgccgaaaatagtatggcctttttatgccaacaagatttttcactagagcacgcaatgtatgcaatgcaggctgttggtatttatactttaggttgcgtattgttggatcaagagcttcaagtcgctaaagaagaaagggaaacacctactactgatagtatgccgccattagtccgacaaggtctggaattaaaggatcaccaaggtgcagagccagccttcttattcggccttgaattgatcatatgcggattagaaaaacaacttaaatgtgaaagtgggtcttaa

SEQ ID NO: 651 - DNA, 627 bp, Artificial sequence
  SuR L7-1E06 CDS
  misc_feature (337)..(338): n is a, c, g, or t
atgggatctagattagataaaagtaaagtgattaacagcgcattagagctgcttaatgaggtcggaatcgaaggtttaacaacccgtaaactcgcccagaagctaggtgtagagcagcctacattgtattggcatgtaaaaaataagcgagctctgctcgacgcaatggccattgagatgctggataggcacgcgactcactattgccctttagaagggaaaagctggcaagattttttacgtaataacgctaaaagtatgagatgtgctttactaagtcatcgcgatggagcaaaagtatgtttaggtacaggctttacagaacagcactatgaanntgccgaaaatagtatggcctttttatgccaacaaggtttttcactagagcacgcaatgtatgcaatgcaggctgctggtatttttactttaggttgcgtattgttggatcaagagcttcaagtcgctaaagaagaaagggaaacacctactactgatagtatgccgccattactccgacaagctctggaattaaaggatcaccaaggtgcagagccagccttcttattcggccttgaattgatcatatgcggattagaaaaacaacttaaatgtgaaagtgggtcttaa

SEQ ID NO: 652 - DNA, 627 bp, Artificial sequence
  SuR L7-1F06 CDS
atgggatctagattagataaaagtaaagtgattaacagcgcattagagctgcttaatgaggtcggaatcgaaggtttaacaacccgtaaactcgcccagaagctaggtgtagagcagcctacattgtattggcatgtaaaaaataagcgagctctgctcgacgcaatggccattgagatgctggataggcacgcgactcactattgccctttagaaggggaaagctggcaagattttttacgtaataacgctaaaagtatgagatgtgctttactaagtcatcgcgatggagcaaaagtatgtttaggtacaggctttacagaacagcaatatgaaactgccgaaaatagtctggcctttttatgccaacaaggtttttcactagagcacgcaatgtatgcaatgcaggctgctggtatttatactttaggttgcgtattgttggatcaagagcttcaagtcgctaaagaagaaagggaaacacctactactgatagtatgccgccattagtccgacaagctctggaattaaaggatcaccaaggtgcagagccagccttcttattcggccttgaattgatcatatgcggattagaaaaacaacttaaatgtgaaagtgggtcttaa

SEQ ID NO: 653 - DNA, 627 bp, Artificial sequence
  SuR L7-1G06 CDS
atgggatctagattagataaaagtaaagygattaacagcgcattagagctgcttaatgaggtcggaatcgaaggtttaacaacccgtaaactcgcccagaagctaggtgtagagcagcctacattgtattggcatgtaaaaaataagcgagctctgctcgacgcaatggccattgagatgctggataggcacgcgactcactattgccctttagaaggggaaagctggcaagattttttacgtaataacgctaaaagtatgagatgtgctttactaagtcatcgcgatggagcaaaagtatgtttaggtacaggctttacagaacagcaatatgaaactgccgaaaatagtatggcctttttatgccaacaaggtttttcactagagaacgcactgtatgcaatgcaggctgttggtatttatactttaggttgcgtattgttggatcaagagcttcaagtcgctaaagaagaaagggaaacacctactactgatagtatgccgccattagtccgacaagctctggaattaaaggatcaccaaggtgcagagccagccttcttattcggccttgaattgatcatatgcggattagaaaaacaacttaaatgtgaaagtgggtcttaa

SEQ ID NO: 654 - DNA, 627 bp, Artificial sequence
  SuR L7-1H06 CDS
atgggatctagattagataaaagtaaagcgattaacagcgcattagagctgcttaatgaggtcggaatcgaaggtttaacaacccgtaaactcgcccagaagctaggtgtagagcagcctacattgtattggcatgtaaaaaataagcgagctctgctcgacgcattggccattgagatgctggataggcacgcgactcactattgccctttagaaggggaaagctggcaagattttttacgtaataacgctaaaagtatgagatgtgctttactaagtcatcgcgatggagcaaaagtatgtttaggtacaggctttacagaaaagcactatgaaactgccgaaaatagtatggcctttttatgccaacaaggtttttcactagagcacgcaatgtatgcaatgcaggctgttggtatttatactttaggttgcgtattgttggatcaagagcttcaagtcgctaaagaagaaagggaaacacctactactgatagtatgccgccattagtccgacaagttctggaattaaaggatcaccaaggtgcagagccagccttcttattcggccttgaattgatcatatgcggattagaaaaacaacttaaatgtgaaagtgggtcttaa

SEQ ID NO: 655 - DNA, 627 bp, Artificial sequence
  SuR L7-1A07 CDS
atgggatctagattagataaaagtaaagygattaacagcgcattagagctgcttaatgaggtcggaatcgaaggtttaacaacccgtaaactcgcccagaagctaggtgtagagcagcctacattgtattggcatgtaaaaaataagcgagctctgctcgacgcattggccattgagatgctggataggcacgcgactcactattgccctttagaaggggaaagctggcaagattttttacgtaataacgctaaaagtatgagatgtgctttactaagtcatcgcgatggagcaaaagtatgtttaggtacaggctttacagaaaagcaatatgaagctgccgaaaatagtatggcctttttatgccaacaaggtttttcactagagcacgcaatgtatgcaatgcaggctgctggtatttatactttaggttgcgtattgttggatcaagagcttcaagtcgctaaagaagaaagggaaacacctactactgatagtatgccgccattagtccgacaagttctggaattaaaggatcaccaaggtgcagagccagccttcttattcggccttgaattgatcatatgcggattagaaaaacaacttaaatgtgaaagtgggtcttaa

SEQ ID NO: 656 - DNA, 627 bp, Artificial sequence
  SuR L7-1B07 CDS
atgggatctagattagataaaagtaaagygattaacagcgcattagagctgcttaatgaggtcggaatcgaaggtttaacaacccgtaaactcgcccagaagctaggtgtagagcagcctacattgtattggcatgtaaaaaataagcgagctctgctcgacgcaatggccattgagatgctggataggcacgcgactcactattgccctttagaaggggaaagctggcaagattttttacgtaataacgctaaaagtatgagatgtgctttactaagtcatcgcgatggagcaaaagtatgtttaggtacaggctttacagaacagcaatatgaaactgccgaaaatagtatggcctttttatgccaacaaggtttttcactagagaacgcaatgtatgcaatgcaggctgcttgtatttatactttaggttgcgtattgttggatcaagagcttcaagtcgctaaagaagaaagggaaacacctactactgatagtatgccgccattagtccgacaagttctggaattaaaggatcaccaaggtgcagagccagccttcttattcggccttgaattgatcatatgcggattagaaaaacaacttaaatgtgaaagtgggtcttaa

SEQ ID NO: 657 - DNA, 627 bp, Artificial sequence
  SuR L7-1C07 CDS
atgggatctagattagataaaagtaaagygattaacagcgcattagagctgcttaatgaggtcggaatcgaaggtttaacaacccgtaaactcgcccagaagctaggtgtagagcagcctacattgtattggcatgtaaaaaataagcgagctctgctcgacgcaatggccattgagatgctggataggcacgcgactcactattgccctttagaaggggaaagctggcaagattttttacgtaataacgctaaaagtatgagatgtgctttactaagtcatcgcgatggagcaaaagtatgtttaggtacaggctttacagaacagcaatatgaaactgccgaaaatagtctggcctttttatgccaacaaggtttttcactagagcacgcactgtatgcaatgcaggctgctggtatttttactttaggttgcgtattgttggatcaagagcttcaagtcgctaaagaagaaagggaaacacctactactgatagtatgccgccattagtccgacaagctctggaattaaaggatcaccaaggtgcagagccagccttcttattcggccttgaattgatcatatgcggattagaaaaacaacttaaatgtgaaagtgggtcttaa

SEQ ID NO: 658 - DNA, 627 bp, Artificial sequence
  SuR L7-1D07 CDS
atgggatctagattagataaaagtaaagygattaacagcgcattagagctgcttaatgaggtcggaatcgaaggtttaacaacccgtaaactcgcccagaagctaggtgtagagcagcctacattgtattggcatgtaaaaaataagcgagctctgctcgacgcaatggccattgagatgctggataggcacgcgactcacgtgtgccctttagaaggggaaagctggcaagattttttacgtaataacgctaaaagtatgagatgtgctttactaagtcatcgcgatggagcaaaagtatgtttaggtacaggctttacagaacagcaatatgaaggtgccgaaaatagtatggcctttttatgccaacaaggtttttcactagagcacgcaatgtatgcaatgcaggctgttggtatttatactttaggttgcgtattgttggatcaagagcttcaagtcgctaaagaagaaagggaaacacctactactgatagtatgccgccattagtccgacaagctctggaattaaaggatcaccaaggtgcagagccagccttcttattcggccttgaattgatcatatgcggattagaaaaacaacttaaatgtggaagtgggtcttaa

SEQ ID NO: 659 - DNA, 627 bp, Artificial sequence
  SuR L7-1E07 CDS
atgggatctagattagataaaagtaaagtgattaacagcgcattagagctgcttaatgaggtcggaatcgaaggtttaacaacccgtaaactcgcccagaagctaggtgtagagcagcctacattgtattggcatgtaaaaaataagcgagctctgctcgacgcattggccattgagatgctggataggcacgcgactcacatctgccctttagaaggggaaagctggcaagattttttacgtaataacgctaaaagtatgagatgtgctttactaagtcatcgcgatggagcaaaagtatgtttaggtacaggctttacagaacagatgtatgaaactgccgaaaatagtatggcctttttatgccaacaaggtttttcactagagaacgcaatgtatgcaatgcaggctgctggtatttttactttaggttgcgtattgttggatcaagagcttcaagtcgctaaagaagaaagggaaacacctactactgatagtatgccgccattagtccgacaagttctggaattaaaggatcaccaaggtgcagagccagccttcttattcggccttgaattgatcatatgcggattagaaaaacaacttaaatgtgaaagtgggtcttaa

SEQ ID NO: 660 - DNA, 627 bp, Artificial sequence
  SuR L7-1F07 CDS
atgggatctagattagataaaagtaaagygattaacagcgcattagagctgcttaatgaggtcggaatcgaaggtttaacaacccgtaaactcgcccagaagctaggtgtagagcagcctacattgtattggcatgtaaaaaataagcgagctctgctcgacgcattggccattgagatgctggataggcacgcgactcactattgccctttagaaggggaaagctggcaagattttttacgtaataacgctaaaagtatgagatgtgctttactaagtcatcgcgatggagcaaaagtatgtttaggtacaggctttacagaacagatgtatgaaagtgccgaaaatagtctggcctttttatgccaacaaggtttttcactagagcacgcaatgtatgcaatgcaggctgctggtatttttactttaggttgcgtattgttggatcaagagcttcaagtcgctaaagaagaaagggaaacacctactactgatagtatgccgccattagtccgacaagttctggaattaaaggatcaccaaggtgcagagccagccttcttattcggccttgaattgatcatatgcggattagaaaaacaacttaaatgtgaaagtgggtcttaa

SEQ ID NO: 661 - DNA, 627 bp, Artificial sequence
  SuR L7-1G07 CDS
  misc_feature (595)..(595): n is a, c, g, or t
atgggatctagattagataaaagtaaagtgattaacagcgcattagagctgcttaatgaggtcggaatcgaaggtttaacaacccgtaaactcgcccagaagctaggtgtagagcagcctacattgtattggcatgtaaaaaataagcgagctctgctcgacgcaatggccattgagatgctggataggcacgcgactcactattgccctttagaaggggaaagctggcaagattttttacgtaataacgctaaaagtatgagatgtgctttactaagtcatcgcgatggagcaaaagtatgtttaggtacaggctttacagaacagcactatgaaagtgccgaaaatagtatggcctttttatgccaacaaggtttttcactagagcacgcaatgtatgcaatgcaggctgctggtatttatactttaggttgcgtattgttggatcaagagcttcaagtcgctaaagaagaaaggcaaacacctactactgatagtatgccgccattagtccgacaagctctggaattaaaggatcaccaaggtgcagagccagccttcttattcggccttgaattgatcatatgcggattanaaaaacaacttaaatgtgaaagtgggtcttaa

SEQ ID NO: 662 - DNA, 627 bp, Artificial sequence
  SuR L7-1A08 CDS
atgggatctagattagataaaagtaaagygattaacagcgcattagagctgcttaatgaggtcggaatcgaaggtttaacaacccgtaaactcgcccagaagctaggtgtagagcagcctacattgtattggcatgtaaaaaataagcgagctctgctcgacgcaatggccattgagatgctggataggcacgcgactcacttgtgccctttagaaggggaaagctggcaagattttttacgtaataacgctaaaagtatgagatgtgctttactaagtcatcgcgatggagcaaaagtatgtttaggtacaggctttacagaacagcaatatgaaactgccgaaaatagtatggcctttttatgccaacaaggtttttcactagagcacgcaatgtatgcaatgcaggctgttggtatttatactttaggttgcgtattgttggatcaagagcttcaagtcgctaaagaagaaagggaaacacctactactgatagtatgccgccattactccgacaagctctggaattaaaggatcaccaaggtgcagagccagccttcttattcggccttgaattgatcatatgcggattagaaaaacaacttaaatgtgaaagtgggtcttaa

SEQ ID NO: 663 - DNA, 627 bp, Artificial sequence
  SuR L7-1C08 CDS
  misc_feature (166)..(166): n is a, c, g, or t
  misc_feature (330)..(330): n is a, c, g, or t
atgggatctagattagataaaagtaaagtgattaacagcgcattagagctgcttaatgaggtcggaatcgaaggtttaacaacccgtaaactcgcccagaagctaggtgtagagcagcctacattgtattggcatgtaaaaaataagcgagctctgctcgacgcantggccattgagatgctggataggcacgcgactcactattgccctttagaaggggaaagctggcaagattttttacgtaataacgctaaaagtatgagatgtgctttactaagtcatcgcgatggagcaaaagtatgtttaggtacaggctttacagaacagcantatgaagctgccgaaaatagtatggcctttttatgccaacaaggtttttcactagagcacgcaatgtatgcaatgcaggctgctggtatttatactttaggttgcgtattgttggatcaagagcttcaagtcgctaaagaagaaagggaaacacctactactgatagtatgccgccattagtccgacaagttctggaattaaaggatcaccaaggtgcagagccagccttcttattcggccttgaattgatcatatgcggattagaaaaacaacttaaatgtgaaagtgggtcttaa

SEQ ID NO: 664 - DNA, 627 bp, Artificial sequence
  SuR L7-1D08 CDS
  misc_feature (511)..(511): n is a, c, g, or t
atgggatctagattagataaaagtaaagtgattaacagcgcattagagctgcttaatgaggtcggaatcgaaggtttaacaacccgtaaactcgcccagaagctaggtgtagagcagcctacattgtattggcatgtaaaaaataagcgagctctgctcgacgcaatggccattgagatgctggataggcacgcgactcactattgccctttagaaggggaaagctggcaagattttttacgtaataacgctaaaagtatgagatgtgctttactaagtcatcgcgatggagcaaaagtatgtttaggtacaggctttacagaacagcaatatgaaactgccgaaaatagtatggcctttttatgccaacaaggtttttcactagagcacgcactgtatgcaatgcaggctgctggtatttatactttaggttgcgtattgttggatcaagagcttcaagtcgctaaagaagaaagggaaacacctactactgatagtatgccgccattantccgacaagttctggaattaaaggatcaccaaggtgcagagccagccttcttattcggccttgaattgatcatatgcggattagaaaaacaacttaaatgtgaaagtgggtcttaa

SEQ ID NO: 665 - DNA, 627 bp, Artificial sequence
  SuR L7-1E08 CDS
atgggatctagattagataaaagtaaagygattaacagcgcattagagctgcttaatgaggtcggaatcgaaggtttaacaacccgtaaactcgcccagaagctaggtgtagagcagcctacattgtattggcatgtaaaaaataagcgagctctgctcgacgcaatggccattgagatgctggataggcacgcgactcactattgccctttagaaggggaaagctggcaagattttttacgtaataacgctaaaagtatgagatgtgctttactaagtcatcgcgatggagcaaaagtatgtttaggtacaggctttacagaacagcaatatgaaactgccgaaaatagtctggcctttttatgccaacaaggtttttcactagagcacgcaatgtatgcaatgcaggctgttggtatttttactttaggttgcgtattgttggatcaagagcttcaagtcgctaaagaagaaagggaaacacctactactgatagtatgccgccattagtccgacaagttctggaattaaaggatcaccaaggtgcagagccagccttcttattcggccttgaattgatcatatgcggattagaaaaacaacttaaatgtgaaagtgggtcttaa

SEQ ID NO: 666 - DNA, 627 bp, Artificial sequence
  SuR L7-1F08 CDS
atgggatctagattagataaaagtaaagtgattaacagcgcattagagctgcttaatgaggtcggaatcgaaggtttaacaacccgtaaactcgcccagaagctaggtgtagagcagcctacattgtattggcatgtaaaaaataagcgagctctgctcgacgcaatggccattgagatgctggataggcacgcgactcactattgccctttagaaggagaaagctggcaagattttttacgtaataacgctaaaagtatgagatgtgctttactaagtcatcgcgatggagcaaaagtatgtttaggtacaggctttacagaacagcaatatgaaactgccgaaaatagtctggcctttttatgccaacaaggtttttcactagagaacgcactgtatgcaatgcaggctgttggtatttatactttaggttgcgtattgttggatcaagagcttcaagtcgctaaagaagaaagggaaacacctactactgatagtatgccgccattagtccgacaagctctggaattaaaggatcaccaaggtgcagagccagccttcttattcggccttgaattgatcatatgcggattagaaaaacaacttaaatgtgaaagtgggtcttaa

SEQ ID NO: 667 - DNA, 627 bp, Artificial sequence
  SuR L7-1G08 CDS
atgggatctagattagataaaagtaaagtgattaacagcgcattagagctgcttaatgaggtcggaatcgaaggtttaacaacccgtaaactcgcccagaagctaggtgtagagcagcctacattgtattggcatgtaaaaaataagcgagctctgctcgacgcaatggccattgagatgctggataggcacgcgactcactattgccctttagaaggggaaagctggcaagattttttacgtaataacgctaaaagtatgagatgtgctttactaagtcatcgcgatggagcaaaagtatgtttaggtacaggctttacagaacagcactatgaaactgccgaaaatagtctggcctttttatgccaacaaggtttttcactagagcacgcaatgtatgcaatgcaggctgttggtatttatactttaggttgcgtattgttggatcaagagcttcaagtcgctaaagaagaaagggaaacacctactactgatagtatgccgccattagtccgacaagctctggaattaaaggatcaccaaggtgcagagccagccttcttattcggccttgaattgatcatatgcggattagaaaaacaacttaaatgtgaaagtgggtcttaa

SEQ ID NO: 668 - DNA, 627 bp, Artificial sequence
  SuR L7-1A09 CDS
atgggatctagattagataaaagtaaagygattaacagcgcattagagctgcttaatgaggtcggaatcgaaggtttaacaacccgtaaactcgcccagaagctaggtgtagagcagcctacattgtattggcatgtaaaaaataagcgagctctgctcgacgcaatggccattgagatgctggataggcacgcgactcactattgccctttagaagaggaaagctggcaagattttttacgtaataacgctaaaagtatgagatgtgctttactaagtcatcgcgatggagcaaaagtatgtttaggtacaggctttacagaacagcaatatgaagctgccgaaaatagtatggcctttttatgccaacaaggtttttcactagagcacgcactgtatgcaatgcaggctgctggtatttatactttaggttgcgtattgttggatcaagagcttcaagtcgctaaagaagaaagggaaacacctactactgatagtatgccgccattagtccgacaagctctggaattaaaggatcaccaaggtgcagagccagccttcttattcggccttgaattgatcatatgcggattagaaaaacaacttaaatgtgaaagtgggtcttaa

SEQ ID NO: 669 - DNA, 627 bp, Artificial sequence
  SuR L7-1B09 CDS
atgggatctagattagataaaagtaaagtgattaacagcgcattagagctgcttaatgaggtcggaatcgaaggtttaacaacccgtaaactcgcccagaagctaggtgtagagcagcctacattgtattggcatgtaaaaaataagcgagctctgctcgacgcaatggccattgagatgctggataggcacgcgactcactattgccctttagaaggggaaagctggcaagattttttacgtaataacgctaaaagtatgagatgtgctttactaagtcatcgcgatggagcaaaagtatgtttaggtacaggctttacagaacagcaatatgaaactgccgaaaatagtctggcctttttatgccaacaaggtttttcactagagaacgcaatgtatgcaatgcaggctgctggtatttatactttaggttgcgtattgttggatcaagagcttcaagtcgctaaagaagaaagggaaacacctactactgatagtatgccgccattagtccgacaaggtctggaattaaaggatcaccaaggtgcagagccagccttcttattcggtcttgaattgatcatatgcggattagaaaaacaacttaaatgtgaaagtgggtcttaa

SEQ ID NO: 670 - DNA, 627 bp, Artificial sequence
  SuR L7-1C09 CDS
atgggatctagattagataaaagtaaagcgattaacagcgcattagagctgcttaatgaggtcggaatcgaaggtttaacaacccgtaaactcgcccagaagctaggtgtagagcagcctacattgtattggcatgtaaaaaataagcgagctctgctcgacgcattggccattgagatgctggataggcacgcgactcactattgccctttagaaggggaaagctggcaagattttttacgtaataacgctaaaagtatgagatgtgctttactaagtcatcgcgatggagcaaaagtatgtttaggtacaggctttacagaacagcactatgaaactgccgaaaatagtctggcctttttatgccaacaaggtttttcactagagaacgcaatgtatgcaatgcaggctgttggtatttttactttaggttgcgtattgttggatcaagagcttcaagtcgctaaagaagaaagggaaacacctactactgatagtatgccgccattagtccgacaagttctggaattaaaggatcaccaaggtgcagagccagccttcttattcggccttgaattgatcatatgcggattagaaaaacaacttaaatgtgaaagtgggtcttaa

SEQ ID NO: 671 - DNA, 627 bp, Artificial sequence
  SuR L7-1D09 CDS
atgggatctagattagataaaagtaaagtgattaacagcgcattagagctgcttaatgaggtcggaatcgaaggtttaacaacccgtaaactcgcccagaagctaggtgtagagcagcctacattgtattggcatgtaaaaaataagcgagctctgctcgacgcaatggccattgagatgctggataggcacgcgactcactattgccctttagaaggggaaagctggcaagattttttacgtaataacgctaaaagtatgagatgtgctttactaagtcatcgcgatggagcaaaagtatgtttaggtacaggctttacagaacagcaatatgaaagtgccgaaaatagtctggcctttttatgccaacaaggtttttcactagagaacgcaatgtatgcaatgcaggctgctggtatttatactttaggttgcgtattgttggatcaagagcttcaagtcgctaaagaagaaagggaaacacctactactgatagtatgccgccattactccgacaagctctggaattaaaggatcaccaaggtgcagagccagccttcttattcggccttgaattgatcatatgcggattagaaaaacaacttaaatgtgaaagtgggtcttaa

SEQ ID NO: 672 - DNA, 627 bp, Artificial sequence
  SuR L7-1E09 CDS
atgggatctagattagataaaagtaaagygattaacagcgcattagagctgcttaatgaggtcggaatcgaaggtttaacaacccgtaaactcgcccagaagctaggtgtagagcagcctacattgtattggcatgtaaaaaataagcgagctctgctcgacgcaatggccattgagatgctggataggcacgcgactcactattgccctttagaaggggaaagctggcaagattttttacgtaataacgctaaaagtatgagatgtgctttactaagtcaacgcgatggagcaaaagtatgtttaggtacaggctttacagaacagcaatatgaaggtgccgaaaatagtctggcctttttatgccaacaaggtttttcactagagcacgcactgtatgcaatgcaggctgctggtatttttactttaggttgcgtattgttggatcaagagcttcaagtcgctaaagaagaaagggaaacacctactactgatagtatgccgccattagtccgacaagctctggaattaaaggatcaccaaggtgcagagccagccttcttattcggccttgaattgatcatatgcggattagaaaaacaacttaaatgtgaaagtgggtcttaa

SEQ ID NO: 673 - DNA, 627 bp, Artificial sequence
  SuR L7-1G09 CDS
atgggatctagattagataaaagtaaagtgattaacagcgcattagagctgcttaatgaggtcggaatcgaaggtttaacaacccgtaaactcgcccagaagctaggtgtagagcagcctacattgtattggcatgtaaaaaataagcgagctctgctcgacgcaatggccattgagatgctggataggcacgcgactcactattgccctttagaaggggaaagctggcaagattttttacgtaataacgctaaaagtatgagatgtgctttactaagtcatcgcgatggagcaaaagtatgtttaggtacaggctttacagaacagcaatatgaaactgccgaaaatagtatggcctttttatgccaacaaggtttttcactagagaacgcactgtatgcaatgcaggctgctggtatttatactttaggttgcgtattgttggatcaagagcttcaagtcgctaaagaagaaagggaaacacctactactgatagtatgccgccattagtccgacaaggtctggaattaaaggatcaccaaggtgcagagccagccttcttattcggccttgaattgatcatatgcggattagaaaaacaacttaaatgtgaaagtgggtcttaa

SEQ ID NO: 674 - DNA, 627 bp, Artificial sequence
  SuR L7-1A10 CDS
atgggatctagattagataaaagtaaagtgattaacagcgcattagagctgcttaatgaggtcggaatcgaaggtttaacaacccgtaaactcgcccagaagctaggtgtagagcagcctacattgtattggcatgtaaaaaataagcgagctctgctcgacgcattggccattgagatgctggataggcacgcgactcactattgccctttagaaggggaaagctggcaagattttttacgtaataacgctaaaagtatgagatgtgctttactaagtcatcgcgatggagcaaaagtatgtttaggtacaggctttacagaacagatgtatgaaagtgccgaaaatagtatggcctttttatgccaacaaggtttttcactagagaacgcaatgtatgcaatgcaggctgctggtatttatactttaggttgcgtattgttggatcaagagcttcaagtcgctaaagaagaaagggaaacacctactactgatagtatgccgccattagtccgacaaggtctggaattaaaggatcaccaaggtgcagagccagccttcttattcggccttgaattgatcatatgcggattagaaaaacaacttaaatgtgaaagtgggtcttaa

SEQ ID NO: 675 - DNA, 627 bp, Artificial sequence
  SuR L7-1B10 CDS
atgggatctagattagataaaagtaaagtgattaacagcgcattagagctgcttaatgaggtcggaatcgaaggtttaacaacccgtaaactcgcccagaagctaggtgtagagcagcctacattgtattggcatgtaaaaaataagcgagctctgctcgacgcaatggccattgagatgctggataggcacgcgactcactattgccctttagaaggggaaagctggcaagattttttacgtaataacgctaaaagtatgagatgtgctttactaagtcatcgcgatggagcaaaagtatgtttaggtacaggctttacagaacagcaatatgaaggtgccgaaaatagtatggcctttttatgccaacaaggtttttcactagagaacgcaatgtatgcaatgcaggctgttggtatttttactttaggttgcgtattgttggatcaagagcttcaagtcgctaaagaagaaagggaaacacctactactgatagtatgccgccattagtccgacaagctctggaattaaaggatcaccaaggtgcagagccagccttcttattcggccttgaattgatcatatgcggattagaaaaacaacttaaatgtgaaagtgggtcttaa

SEQ ID NO: 676 - DNA, 627 bp, Artificial sequence
  SuR L7-1C10 CDS
  misc_feature (203)..(204): n is a, c, g, or t
  misc_feature (330)..(330): n is a, c, g, or t
  misc_feature (337)..(338): n is a, c, g, or t
  misc_feature (394)..(394): n is a, c, g, or t
atgggatctagattagataaaagtaaagtgattaacagcgcattagagctgcttaatgaggtcggaatcgaaggtttaacaacccgtaaactcgcccagaagctaggtgtagagcagcctacattgtattggcatgtaaaaaataagcgagctctgctcgacgcattggccattgagatgctggataggcacgcgactcactnntgccctttagaaggggaaagctggcaagattttttacgtaataacgctaaaagtatgagatgtgctttactaagtcatcgcgatggagcaaaagtatgtttaggtacaggctttacagaacagcantatgaanntgccgaaaatagtatggcctttttatgccaacaaggtttttcactagagcacgcantgtatgcaatgcaggctgctggtatttttactttaggttgcgtattgttggatcaagagcttcaagtcgctaaagaagaaagggaaacacctactactgatagtatgccgccattactccgacaagctctggaattaaaggatcaccaaggtgcagagccagccttcttattcggccttgaattgatcatatgcggattagaaaaacaacttaaatgtgaaagtgggtcttaa

SEQ ID NO: 677 - DNA, 627 bp, Artificial sequence
  SuR L7-1D10 CDS
atgggatctagattagataaaagtaaagtgattaacagcgcattagagctgcttaatgaggtcggaatcgaaggtttaacaacccgtaaactcgcccagaagctaggtgtagagcagcctacattgtattggcatgtaaaaaataagcgagctctgctcgacgcaatggccattgagatgctggataggcacgcgactcacatctgccctttagaaggggaaagctggcaagattttttacgtaataacgctaaaagtatgagatgtgctttactaagtcatcgcgatggagcaaaagtatgtttaggtacaggctttacagaacagcaatatgaaactgccgaaaatagtctggcctttttatgccaacaaggtttttcactagagaacgcactgtatgcaatgcaggctgctggtatttttactttaggttgcgtattgttggatcaagagcttcaagtcgctaaagaagaaagggaaacacctactactgatagtatgccgccattagtccgacaagttctggaattaaaggatcaccaaggtgcagagccagccttcttattcggccttgaattgatcatatgcggattagaaaaacaacttaaatgtgaaagtgggtcttaa

SEQ ID NO: 678 - DNA, 627 bp, Artificial sequence
  SuR L7-1F10 CDS
  misc_feature (203)..(204): n is a, c, g, or t
  misc_feature (337)..(337): n is a, c, g, or t
  misc_feature (388)..(388): n is a, c, g, or t
  misc_feature (415)..(415): n is a, c, g, or t
  misc_feature (512)..(512): n is a, c, g, or t
  misc_feature (521)..(521): n is a, c, g, or t
atgggatctagattagataaaagtaaagtgattaacagcgcattagagctgcttaatgaggtcggaatcgaaggtttaacaacccgtaaactcgcccagaagctaggtgtagagcagcctacattgtattggcatgtaaaaaataagcgagctctgctcgacgcattggccattgagatgctggataggcacgcgactcactnntgccctttagaaggggaaagctggcaagattttttacgtaataacgctaaaagtatgagatgtgctttactaagtcatcgcgatggagcaaaagtatgtttaggtacaggctttacagaacagctgtatgaanctgccgaaaatagtctggcctttttatgccaacaaggtttttcactagagnacgcactgtatgcaatgcaggctgctngtatttatactttaggttgcgtattgttggatcaagagcttcaagtcgctaaagaagaaagggaaacacctactactgatagtatgccgccattagnccgacaagntctggaattaaaggatcaccaaggtgcagagccagccttcttattcggccttgaattgatcatatgcggattagaaaaacaacttaaatgtgaaagtgggtcttaa

SEQ ID NO: 679 - DNA, 627 bp, Artificial sequence
  SuR L7-1A11 CDS
atgggatctagattagataaaagtaaagtgattaacagcgcattagagctgcttaatgaggtcggaatcgaaggtttaacaacccgtaaactcgcccagaagctaggtgtagagcagcctacattgtattggcatgtaaaaaataagcgagctctgctcgacgcattggccattgagatgctggataggcacgcgactcactattgccctttagaaggggaaagctggcaagattttttacgtaataacgctaaaagtatgagatgtgctttactaagtcatcgcgatggagcaaaagtatgtttaggtacaggctttacagaaaagcaatatgaaagtgccgaaaatagtctggcctttttatgccaacaaggtttttcactagagcacgcaatgtatgcaatgcaggctgctggtatttatactttaggttgcgtattgttggatcaagagcttcaagtcgctaaagaagaaagggaaacacctactactgatagtatgccgccattagtccgacaagctctggaattaaaggatcaccaaggtgcagagccagccttcttattcggccttgaattgatcatatgcggattagaaaaacaacttaaatgtgaaagtgggtcttaa

SEQ ID NO: 680 - DNA, 627 bp, Artificial sequence
  SuR L7-1B11 CDS
  misc_feature (511)..(511): n is a, c, g, or t
atgggatctagattagataaaagtaaagtgattaacagcgcattagagctgcttaatgaggtcggaatcgaaggtttaacaacccgtaaactcgcccagaagctaggtgtagagcagcctacattgtattggcatgtaaaaaataagcgagctctgctcgacgcaatggccattgagatgctggataggcacgcgactcactattgccctttagaaggggaaagctggcaagattttttacgtaataacgctaaaagtatgagatgtgctttactaagtcatcgcgatggagcaaaagtatgtttaggtacaggctttacagaacagcaatatgaaagtgccgaaaatagtatggcctttttatgccaacaaggtttttcactagagcacgcaatgtatgcaatgcaggctgctggtatttatactttaggttgcgtattgttggatcaagagcttcaagtcgctaaagaagaaagggaaacacctactactgatagtatgccgccattantccgacaagttctggaattaaaggatcaccaaggtgcagagccagccttcttattcggccttgaattgatcatatgcggattagaaaaacaacttaaatgtgaaagtgggtcttaa

SEQ ID NO: 681 - DNA, 627 bp, Artificial sequence
  SuR L7-1C11 CDS
  misc_feature (166)..(166): n is a, c, g, or t
  misc_feature (352)..(352): n is a, c, g, or t
  misc_feature (415)..(415): n is a, c, g, or t
atgggatctagattagataaaagtaaagtgattaacagcgcattagagctgcttaatgaggtcggaatcgaaggtttaacaacccgtaaactcgcccagaagctaggtgtagagcagcctacattgtattggcatgtaaaaaataagcgagctctgctcgacgcantggccattgagatgctggataggcacgcgactcactattgccctttagaaggggaaagctggcaagattttttacgtaataacgctaaaagtatgagatgtgctttactaagtcatcgcgatggagcaaaagtatgtttaggtacaggctttacagaacagatgtatgaaactgccgaaaatagtntggcctttttatgccaacaaggtttttcactagagcacgcaatgtatgcaatgcaggctgctngtatttatactttaggttgcgtattgttggatcaagagcttcaagtcgctaaagaagaaagggaaacacctactactgatagtatgccgccattagctcgacaaggtctggaattaaaggatcaccaaggtgcagagccagccttcttattcggccttgaattgatcatatgcggattagaaaaacaacttaaatgtgaaagtgggtcttaa

SEQ ID NO: 682 - DNA, 627 bp, Artificial sequence
  SuR L7-1E11 CDS
  misc_feature (330)..(330): n is a, c, g, or t
atgggatctagattagataaaagtaaagtgattaacagcgcattagagctgcttaatgaggtcggaatcgaaggtttaacaacccgtaaactcgcccagaagctaggtgtagagcagcctacattgtattggcatgtaaaaaataagcgagctctgctcgacgcaatggccattgagatgctggataggcacgcgactcactattgccctttagaaggggaaagctggcaagattttttacgtaataacgctaaaagtatgagatgtgctttactaagtcatcgcgatggagcaaaagtatgtttaggtacaggctttacagaacagcantatgaagctgccgaaaatagtatggcctttttatgccaacaaggtttttcactagagcacgcaatgtatgcaatgcaagctgctggtatttttactttaggttgcgtattgttggatcaagagcttcaagtcgctaaagaagaaagggaaacacctactactgatagtatgccgccattagtccgacaagctctggaattaaaggatcaccaaggtgcagagccagccttcttattcggccttgaattgatcatatgcggattagaaaaacaacttaaatgtgaaagtgggtcttaa

SEQ ID NO: 683 - DNA, 627 bp, Artificial sequence
  SuR L7-1A12 CDS
  misc_feature (204)..(204): n is a, c, g, or t
atgggatctagattagataaaagtaaagtgattaacagcgcattagagctgcttaatgaggtcggaatcgaaggtttaacaacccgtaaactcgcccagaagctaggtgtagagcagcctacattgtattggcatgtaaaaaataagcgagctctgctcgacgcaatggccattgagatgctggataggcacgcgactcacatntgccctttagaaggggaaagctggcaagattttttacgtaataacgctaaaagtatgagatgtgctttactaagtcatcgcgatggagcaaaagtatgtttaggtacaggctttacagaacagcaatatgaaggtgccgaaaatagtctggcctttttatgccaacaaggtttttcactagagcacgcaatgtatgcaatgcaggctgttggtatttatactttaggttgcgtattgttggatcaagagcttcaagtcgctaaagaagaaagggaaacacctactactgatagtatgccgccattagtccgacaaggtctggaattaaaggatcaccaaggtgcagagccagccttcttattcggccttgaattgatcatatgcggattagaaaaacaacttaaatgtgaaagtgggtcttaa

SEQ ID NO: 684 - DNA, 627 bp, Artificial sequence
  SuR L7-1C12 CDS
  misc_feature (330)..(330): n is a, c, g, or t
  misc_feature (337)..(337): n is a, c, g, or t
  misc_feature (422)..(422): n is a, c, g, or t
  misc_feature (595)..(595): n is a, c, g, or t
atgggatctagattagataaaagtaaagtgattaacagcgcattagagctgcttaatgaggtcggaatcgaaggtttaacaacccgtaaactcgcccagaagctaggtgtagagcagcctacattgtattggcatgtaaaaaataagcgagctctgctcgacgcaatggccattgagatgctggataggcacgcgactcactattgccctttagaaggggaaagctggcaagattttttacgtaataacgctaaaagtatgagatgtgctttactaagtcatcgcgatggagcaaaagtatgtttaggtacaggctttacagaacagcantatgaanctgccgaaaatagtctggcctttttatgccaacaaggtttttcactagagcacgcaatgtatgcaatgcaggctgctggtatttntactttaggttgcgtattgttggatcaagagcttcaagtcgctaaagaagaaagggaaacacctactactgatagtatgccgccattagctcgacaaggtctggaattaaaggatcaccaaggtgcagagccagccttcttattcggccttgaattgatcatatgcggattanaaaaacaacttaaatgtgaaagtgggtcttaa

SEQ ID NO: 685 - DNA, 627 bp, Artificial sequence
  SuR L7-1F12 CDS
  misc_feature (461)..(461): n is a, c, g, or t
  misc_feature (583)..(583): n is a, c, g, or t
  misc_feature (595)..(595): n is a, c, g, or t
atgggatctagattagataaaagtaaagtgattaacagcgcattagagctgcttaatgaggtcggaatcgaaggtttaacaacccgtaaactcgcccagaagctaggtgtagagcagcctacattgtattggcatgtaaaaaataagcgagctctgctcgacgcaatggccattgagatgctggataggcacgcgactcactattgccctttagaaggggaaagctggcaagattttttacgtaataacgctaaaagtatgagatgtgctttactaagtcatcgcgatggagcaaaagtatgtttaggtacaggctttacagaacagcaatatgaaagtgccgaaaatagtatggcctttttatgccaacaaggtttttcactagagcacgcaatgtatgcaatgcaggctgctggtatttatactttaggttgcgtattgttggatcaagagcttcaagncgctaaagaagaaagggaaacacctactactgatagtatgccgccattactccgacaagttctggaattaaatgatcaccaaggtgcagagccagccttcttattcggccttgaattgatcntatgcggattanaaaaacaacttaaatgtgaaagtgggtcttaa

SEQ ID NO: 686 - DNA, 627 bp, Artificial sequence
  SuR L7-1G12 CDS
  misc_feature (279)..(279): n is a, c, g, or t
  misc_feature (417)..(417): n is a, c, g, or t
  misc_feature (461)..(461): n is a, c, g, or t
  misc_feature (481)..(481): n is a, c, g, or t
  misc_feature (498)..(498): n is a, c, g, or t
  misc_feature (518)..(518): n is a, c, g, or t
  misc_feature (522)..(522): n is a, c, g, or t
  misc_feature (556)..(556): n is a, c, g, or t
  misc_feature (583)..(583): n is a, c, g, or t
  misc_feature (600)..(600): n is a, c, g, or t
  misc_feature (603)..(603): n is a, c, g, or t
atgggatctagattagataaaagtaaagtgattaacagcgcattagagctgcttaatgaggtcggaatcgaaggtttaacaacccgtaaactcgcccagaagctaggtgtagagcagcctacattgtattggcatgtaaaaaataagcgagctctgctcgacgcaatggccattgagatgctggataggcacgcgactcactattgccctttagaaggggaaagctggcaagattttttacgtaataacgctaaaagtatgagatgtgctttactaagncatcgcgatggagcaaaagtatgtttaggtacaggctttacagaacagcaatatgaaggtgccgaaaatagtctggcctttttatgccaacaaggtttttcactagagcacgcaatgtatgcaatgcaggctgctggnatttatactttaggttgcgtattgttggatcaagagcttcaagncgctaaagaagaaagggaancccctactactgatagnatgccgccattagctcgacnaggnctggaattaaaggatcaccaaggtccagagccanccttcttattcggccttgaattgatcntatgcggattagaaaancancttaaatgtgaaagtgggtcttaa

SEQ ID NO: 687 - DNA, 627 bp, Artificial sequence
  SuR L7-2A01 CDS
atgggatctagattagataaaagtaaagtgattaacagcgcattagagctgcttaatgaggtcggaatcgaaggtttaacaacccgtaaactcgcccagaagctaggtgtagagcagcctacattgtattggcatgtaaaaaataagcgagctctgctcgacgcaatggccattgagatgctggataggcacgcgactcacgtgtgccctttagaaggggaaagctggcaagattttttacgtaataacgctaaaagtatgagatgtgctttactaagtcatcgcgatggagcaaaagtatgtttaggtacaggctttacagaacagcaatatgaaggtgccgaaaatagtatggcctttttatgccaacaaggtttttcactagagcacgcaatgtatgcaatgcaggctgttggtatttatactttaggttgcgtattgttggatcaagagcttcaagtcgctaaagaagaaagggaaacacctactactgatagtatgccgccattagtccgacaagctctggaattaaaggatcaccaaggtgcagagccagccttcttattcggccttgaattgatcatatgcggattagaaaaacaacttaaatgtggaagtgggtcttaa

SEQ ID NO: 688 - DNA, 627 bp, Artificial sequence
  SuR L7-2B01 CDS
  misc_feature (166)..(166): n is a, c, g, or t
  misc_feature (203)..(203): n is a, c, g, or t
  misc_feature (325)..(325): n is a, c, g, or t
  misc_feature (328)..(330): n is a, c, g, or t
  misc_feature (352)..(352): n is a, c, g, or t
  misc_feature (388)..(388): n is a, c, g, or t
  misc_feature (415)..(415): n is a, c, g, or t
  misc_feature (422)..(422): n is a, c, g, or t
  misc_feature (513)..(513): n is a, c, g, or t
atgggatctagattagataaaagtaaagtgattaacagcgcattagagctgcttaatgaggtcggaatcgaaggtttaacaacccgtaaactcgcccagaagctaggtgtagagcagcctacattgtattggcatgtaaaaaataagcgagctctgctcgacgcantggccattgagatgctggataggcacgcgactcactngtgccctttagaaggggaaagctggcaagattttttacgtaataacgctaaaagtatgagatgtgctttactaagtcatcgcgatggagcaaaagtatgtttaggtacaggctttacagaanagnnntatgaaggtgccgaaaatagtntggcctttttatgccaacaaggtttttcactagagnacgcaatgtatgcaatgcaggctgctngtatttntactttaggttgcgtattgttggatcaagagcttcaagtcgctaaagaagaaagggaaacacctactactgatagtatgccgccattagcncgacaagttctggaattaaaggatcaccaaggtgcagagccagccttcttattcggccttgaattgatcatatgcggattagaaaaacaacttaaatgtgaaagtgggtcttaa

SEQ ID NO: 689 - DNA, 627 bp, Artificial sequence
  SuR L7-2D01 CDS
  misc_feature (325)..(325): n is a, c, g, or t
  misc_feature (328)..(328): n is a, c, g, or t
  misc_feature (394)..(394): n is a, c, g, or t
  misc_feature (413)..(413): n is a, c, g, or t
  misc_feature (512)..(512): n is a, c, g, or t
atgggatctagattagataaaagtaaagtgattaacagcgcattagagctgcttaatgaggtcggaatcgaaggtttaacaacccgtaaactcgcccagaagctaggtgtagagcagcctacattgtattggcatgtaaaaaataagcgagctctgctcgacgcaatggccattgagatgctggataggcacgcgactcactattgccctttagaaggggaaagctggcaagattttttacgtaataacgctaaaagtatgagatgtgctttactaagtcatcgcgatggagcaaaagtatgtttaggtacaggctttacagaanagntgtatgaaagtgccgaaaatagtatggcctttttatgccaacaaggtttttcactagagcacgcantgtatgcaatgcaggctgntggtatttatactttaggttgcgtattgttggatcaagagcttcaagtcgctaaagaagaaagggaaacacctactactgatagtatgccgccattagntcgacaagctctggaattaaaggatcaccaaggtgcagagccagccttcttattcggccttgaattgatcatatgcggattagaaaaacaacttaaatgtgaaagtgggtcttaa

SEQ ID NO: 690 - DNA, 627 bp, Artificial sequence
  SuR L7-2E01 CDS
atgggatctagattagataaaagtaaagtgattaacagcgcattagagctgcttaatgaggtcggaatcgaaggtttaacaacccgtaaactcgcccagaagctaggtgtagagcagcctacattgtattggcatgtaaaaaataagcgagctctgctcgacgcattggccattgagatgctggataggcacgcgactcactattgccctttagaaggggaaagctggcaagattttttacgtaataacgctaaaagtatgagatgtgctttactaagtcatcgcgatggagcaaaagtatgtttaggtacaggctttacagaaaagcaatatgaaactgccgaaaatagtatggcctttttatgccaacaaggtttttcactagagaacgcactgtatgcaatgcaggctgttggtatttatactttaggttgcgtattgttggatcaagagcttcaagtcgctaaagaagaaagggaaacacctactactgatagtatgccgccattagtccgacaagctctggaattaaaggatcaccaaggtgcagagccagccttcttattcggccttgaattgatcatatgcggattagaaaaacaacttaaatgtgaaagtgggtcttaa

SEQ ID NO: 691 - DNA, 627 bp, Artificial sequence
  SuR L7-2F01 CDS
atgggatctagattagataaaagtaaagtgattaacagcgcattagagctgcttaatgaggtcggaatcgaaggtttaacaacccgtaaactcgcccagaagctaggtgtagagcagcctacattgtattggcatgtaaaaaataagcgagctctgctcgacgcattggccattgagatgctggataggcacgcgactcactattgccctttagaaggggaaagctggcaagattttttacgtaataacgctaaaagtatgagatgtgctttactaagtcatcgcgatggagcaaaagtatgtttaggtacaggctttacagaacagatgtatgaaactgccgaaaatagtctggcctttttatgccaacaaggtttttcactagagcacgcaatgtatgcaatgcaggctgctggtatttttactttaggttgcgtattgttggatcaagagcttcaagtcgctaaagaagaaagggaaacacctactactgatagtatgccgccattagtccgacaagttctggaattaaaggatcaccaaggtgcagagccagccttcttattcggccttgaattgatcatatgcggattagaaaaacaacttaaatgtgaaagtgggtcttaa

SEQ ID NO: 692 - DNA, 627 bp, Artificial sequence
  SuR L7-2G01 CDS
  misc_feature (325)..(325): n is a, c, g, or t
atgggatctagattagataaaagtaaagtgattaacagcgcattagagctgcttaatgaggtcggaatcgaaggtttaacaacccgtaaactcgcccagaagctaggtgtagagcagcctacattgtattggcatgtaaaaaataagcgagctctgctcgacgcaatggccattgagatgctggataggcacgcgactcactattgccctttagaaggggaaagctggcaagattttttacgtaataacgctaaaagtatgagatgtgctttactaagtcatcgcgatggagcaaaagtatgtttaggtacaggctttacagaanagctgtatgaaagtgccgaaaatagtctggcctttttatgccaacaaggtttttcactagagcacgcaatgtatgcaatgcaggctgttggtatttatactttaggttgcgtattgttggatcaagagcttcaagtcgctaaagaagaaagggaaacacctactactgatagtatgccgccattagtccgacaagttctggaattaaaggatcaccaaggtgcagagccagccttcttattcggccttgaattgatcatatgcggattagaaaaacaacttaaatgtgaaagtgggtcttaa

SEQ ID NO: 693 - DNA, 627 bp, Artificial sequence
  SuR L7-2H01 CDS
atgggatctagattagataaaagtaaagtgattaacagcgcattagagctgcttaatgaggtcggaatcgaaggtttaacaacccgtaaactcgcccagaagctaggtgtagagcagcctacattgtattggcatgtaaaaaataagcgagctctgctcgacgcattggccattgagatgctggataggcacgcgactcactattgccctttagaaggggaaagctggcaagattttttacgtaataacgctaaaagtatgagatgtgctttactaagtcatcgcgatggagcaaaagtatgtttaggtacaggctttacagaacagatgtatgaaactgccgaaaatagtatggcctttttatgccaacaaggtttttcactagagcacgcactgtatgcaatgcaggctgctggtatttttactttaggttgcgtattgttggatcaagagcttcaagtcgctaaagaagaaagggaaacacctactactgatagtatgccgccattagtccgacaagctctggaattaaaggatcaccaaggtgcagagccagccttcttattcggccttgaattgatcatatgcggattagaaaaacaacttaaatgtgaaagtgggtcttaa

SEQ ID NO: 694 - DNA, 627 bp, Artificial sequence
  SuR L7-2B02 CDS
atgggatctagattagataaaagtaaagtgattaacagcgcattagagctgcttaatgaggtcggaatcgaaggtttaacaacccgtaaactcgcccagaagctaggtgtagagcagcctacattgtattggcatgtaaaaaataagcgagctctgctcgacgcaatggccattgagatgctggataggcacgcgactcactattgccctttagaaggggaaagctggcaagattttttacgtaataacgctaaaagtatgagatgtgctttactaagtcatcgcgatggagcaaaagtatgtttaggtacaggctttacagaacagatgtatgaaagtgccgaaaatagtctggcctttttatgccaacaaggtttttcactagagaacgcactgtatgcaatgcaggctgttggtatttatactttaggttgcgtattgttggatcaagagcttcaagtcgctaaagaagaaagggaaacacctactactgatagtatgccgccattagtccgacaagttctggaattaaaggatcaccaaggtgcagagccagccttcttattcggccttgaattgatcatatgcggattagaaaaacaacttaaatgtgaaagtgggtcttaa

SEQ ID NO: 695 - DNA, 627 bp, Artificial sequence
  SuR L7-2D02 CDS
atgggatctagattagataaaagtaaagtgattaacagcgcattagagctgcttaatgaggtcggaatcgaaggtttaacaacccgtaaactcgcccagaagctaggtgtagagcagcctacattgtattggcatgtaaaaaataagcgagctctgctcgacgcaatggccattgagatgctggataggcacgcgactcacttctgccctttagaaggggaaagctggcaagattttttacgtaataacgctaaaagtatgagatgtactttactaagtcatcgcgatggagcaaaagtatgtttaggtacaggctttacagaacagcaatatgaaagtgccgaaaatagtctggcctttttatgccaacaaggtttttcactagagaacgcaatgtatgcaatgcaggctgttggtatttatactttaggttgcgtattgttggatcaagagcttcaagtcgctaaagaagaaagggaaacacctactactgatagtatgccgccattagtccgacaagctctggaattaaaggatcaccaaggtgcagagccagccttcttattcggccttgaattgatcatatgcggattagaaaaacaacttaaatgtgaaagtgggtcttaa

SEQ ID NO: 696 - DNA, 627 bp, Artificial sequence
  SuRL7-2E02 CDS
atgggatctagattagataaaagtaaagtgattaacagcgcattagagctgcttaatgaggtcggaatcgaaggtttaacaacccgtaaactcgcccagaagctaggtgtagagcagcctacattgtattggcatgtaaaaaataagcgagctctgctcgacgcattggccattgagatgctggataggcacgcgactcacatctgccctttagaaggggaaagctggcaagattttttacgtaataacgctaaaagtatgagatgtgctttactaagtcatcgcgatggagcaaaagtatgtttaggtacaggctttacagaacagatgtatgaagctgccgaaaatagtatggcctttttatgccaacaaggtttttcactagagaacgcaatgtatgcaatgcaggctgctggtatttatactttaggttgcgtattgttggatcaagagcttcaagtcgctaaagaagaaagggaaacacctactactgatagtatgccgccattagtccgacaagctctggaattaaaggatcaccaaggtgcagagccagccttcttattcggccttgaattgatcatatgcggattagaaaaacaacttaaatgtgaaagtgggtcttaa

SEQ ID NO: 697 - DNA, 627 bp, Artificial sequence
  SuR L7-2F02 CDS
atgggatctagattagataaaagtaaagtgattaacagcgcattagagctgcttaatgaggtcggaatcgaaggtttaacaacccgtaaactcgcccagaagctaggtgtagagcagcctacattgtattggcatgtaaaaaataagcgagctctgctcgacgcaatggccattgagatgctggataggcacgcgactcactattgccctttagaaggggaaagctggcaagattttttacgtaataacgctaaaagtatgagatgtgctttactaagtcatcgcgatggagcaaaagtatgtttaggtacaggctttacagaacagcactatgaaactgccgaaaatagtctggcctttttatgccaacaaggtttttcactagagaacgcaatgtatgcaatgcaggctgctggtatttatactttaggttgcgtattgttggatcaagagcttcaagtcgctaaagaagaaagggaaacacctactactgatagtatgccgccattagtccgacaagttctggaattaaaggatcaccaaggtgcagagccagccttcttattcggccttgaattgatcatatgcggattagaaaaacaacttaaatgtgaaagtgggtcttaa

SEQ ID NO: 698 - DNA, 627 bp, Artificial sequence
  SuR L7-2G02 CDS
atgggatctagattagataaaagtaaagtgattaacagcgcattagagctgcttaatgaggtcggaatcgaaggtttaacaacccgtaaactcgcccagaagctaggtgtagagcagcctacattgtattggcatgtaaaaaataagcgagctctgctcgacgcaatggccattgagatgctggataggcacgcgactcacttgtgccctttagaaggggaaagctggcaagattttttacgtaataacgctaaaagtatgagatgtgctttactaagtcatcgcgatggagcaaaagtatgtttaggtacaggctttacagaacagcaatatgaaactgccgaaaatagtatggcctttttatgccaacaaggtttttcactagagcacgcaatgtatgcaatgcaggctgctggtatttatactttaggttgcgtattgttggatcaagagcttcaagtcgctaaagaagaaagggaaacacctactactgatagtatgccgccattagtccgacaaggtctggaattaaaggatcaccaaggtgcagagccagccttcttattcggccttgaattgatcatatgcggattagaaaaacaacttaaatgtgaaagtgggtcttaa

SEQ ID NO: 699 - DNA, 627 bp, Artificial sequence
  SuR L7-2H02 CDS
atgggatctagattagataaaagtaaagtgattaacagcgcattagagctgcttaatgaggtcggaatcgaaggtttaacaacccgtaaactcgcccagaagctaggtgtagagcagcctacattgtattggcatgtaaaaaataagcgagctctgctcgacgcattggccattgagatgctggataggcacgcgactcacttctgccctttagaaggggaaagctggcaagattttttacgtaataacgctaaaagtatgagatgtgctttactaagtcatcgcgatggagcaaaagtatgtttaggtacaggctttacagaacagatgtatgaagctgccgaaaatagtatggcctttttatgccaacaaggtttttcactagagcacgcaatgtatgcaatgcaggctgtttgtatttatactttaggttgcgtattgttggatcaagagcttcaagtcgctaaagaagaaagggaaacacctactactgatagtatgccgccattagctcgacaaggtctggaattaaaggatcaccaaggtgcagagccagccttcttattcggccttgaattgatcatatgcggattagaaaaacaacttaaatgtgaaagtgggtcttaa

SEQ ID NO: 700 - DNA, 627 bp, Artificial sequence
  SuR L7-2D03 CDS
atgggatctagattagataaaagtaaagtgattaacagcgcattagagctgcttaatgaggtcggaatcgaaggtttaacaacccgtaaactcgcccagaagctaggtgtagagcagcctacattgtattggcatgtaaaaaataagcgagctctgctcgacgcattggccattgagatgctggataggcacgcgactcactattgccctttagaaggggaaagctggcaagattttttacgtaataacgctaaaagtatgagatgtgctttactaagtcatcgcgatggagcaaaagtatgtttaggtacaggctttacagaacagcactatgaaactgccgaaaatagtctggcctttttatgccaacaaggtttttcactagagaacgcaatgtatgcaatgcaggctgttggtatttttactttaggttgcgtattgttggatcaagagcttcaagtcgctaaagaagaaagggaaacacctactactgatagtatgccgccattagtccgacaagttctggaattaaaggatcaccaaggtgcagagccagccttcttattcggccttgaattgatcatatgcggattagaaaaacaacttaaatgtgaaagtgggtcttaa

SEQ ID NO: 701 - DNA, 627 bp, Artificial sequence
  SuR L7-2E03 CDS
atgggatctagattagataaaagtaaagtgattaacagcgcattagagctgcttaatgaggtcggaatcgaaggtttaacaacccgtaaactcgcccagaagctaggtgtagagcagcctacattgtattggcatgtaaaaaataagcgagctctgctcgacgcaatggccattgagatgctggataggcacgcgactcactattgccctttagaaggggaaagctggcaagattttttacgtaataacgctaaaagtatgagatgtgctttactaagtcatcgcgatggagcaaaagtatgtttaggtacaggctttacagaacagcaatatgaaagtgccgaaaatagtctggcctttttatgccaacaaggtttttcactagagaacgcaatgtatgcaatgcaggctgctggtatttatactttaggttgcgtattgttggatcaagagcttcaagtcgctaaagaagaaagggaaacacctactactgatagtatgccgccattagtccgacaagctctggaattaaaggatcaccaaggtgcagagccagccttcttattcggccttgaattgatcatatgcggattagaaaaacaacttaaatgtgaaagtgggtcttaa

SEQ ID NO: 702 - DNA, 627 bp, Artificial sequence
  SuR L7-2F03 CDS
atgggatctagattagataaaagtaaagtgattaacagcgcattagagctgcttaatgaggtcggaatcgaaggtttaacaacccgtaaactcgcccagaagctaggtgtagagcagcctacattgtattggcatgtaaaaaataagcgagctctgctcgacgcaatggccattgagatgctggataggcacgcgactcactattgccctttagaaggggaaagctggcaagattttttacgtaataacgctaaaagtatgagatgtgctttactaagtcatcgcgatggagcaaaagtatgtttaggtacaggctttacagaacagcaatatgaagctgccgaaaatagtctggcctttttatgccaacaaggtttttcactagagaacgcactgtatgcaatgcaggctgttggtatttatactttaggttgcgtattgttggatcaagagcttcaagtcgctaaagaagaaagggaaacacctactactgatagtatgccgccattagctcgacaagctctggaattaaaggatcaccaaggtgcagagccagccttcttattcggccttgaattgatcatatgcggattagaaaaacaacttaaatgtgaaagtgggtcttaa

SEQ ID NO: 703 - DNA, 627 bp, Artificial sequence
  SuR L7-2G03 CDS
atgggatctagattagataaaagtaaagtgattaacagcgcattagagctgcttaatgaggtcggaatcgaaggtttaacaacccgtaaactcgcccagaagctaggtgtagagcagcctacattgtattggcatgtaaaaaataagcgagctctgctcgacgcaatggccattgagatgctggataggcacgcgactcacttctgccctttagaaggggaaagctggcaagattttttacgtaataacgctaaaagtatgagatgtgctttactaagtcatcgcgatggagcaaaagtatgtttaggtacaggctttacagaacagcaatatgaagctgccgaaaatagtatggcctttttatgccaacaaggtttttcactagagcacgcactgtatgcaatgcaggctgttggtatttttactttaggttgcgtattgttggatcaagagcttcaagtcgctaaagaagaaagggaaacacctactactgatagtatgccgccattagtccgacaaggtctggaattaaaggatcaccaaggtgcagagccagccttcttattcggacttgaattgatcatatgcggattagaaaaacaacttaaatgtgaaagtgggtcttaa

SEQ ID NO: 704 - DNA, 627 bp, Artificial sequence
  SuR L7-2H03 CDS
atgggatctagattagataaaagtaaagtgattaacagcgcattagagctgcttaatgaggtcggaatcgaaggtttaacaacccgtaaactcgcccagaagctaggtgtagagcagcctacattgtattggcatgtaaaaaataagcgagctctgctcgacgcattggccattgagatgctggataggcacgcgactcactattgccctttagaaggggaaagctggcaagattttttacgtaataacgctaaaagtatgagatgtgctttactaagtcatcgcgatggagcaaaagtatgtttaggtacaggctttacagaacagatgtatgaaactgccgaaaatagtatggcctttttatgccaacaaggtttttcactagagaacgcaatgtatgcaatgcaggctgttggtatttttactttaggttgcgtattgttggatcaagagcttcaagtcgctaaagaagaaagggaaacacctactactgatagtatgccgccattagtccgacaagttctggaattaaaggatcaccaaggtgcagagccagccttcttattcggccttgaattgatcatatgcggattagaaaaacaacttaaatgtgaaagtgggtcttaa

SEQ ID NO: 705 - DNA, 627 bp, Artificial sequence
  SuR L7-2D04 CDS
atgggatctagattagataaaagtaaagtgattaacagcgcattagagctgcttaatgaggtcggaatcgaaggtttaacaacccgtaaactcgcccagaagctaggtgtagagcagcctacattgtattggcatgtaaaaaataagcgagctctgctcgacgcattggccattgagatgctggataggcacgcgactcactattgccctttagaaggggaaagctggcaagattttttacgtaataacgctaaaagtatgagatgtgctttactaagtcatcgcgatggagcaaaagtatgtttaggtacaggctttacagaaaagcaatatgaaagtgccgaaaatagtctggcctttttatgccaacaaggtttttcactagagcacgcactgtatgcaatgcaggctgttggtatttatactttaggttgcgtattgttggatcaagagcttcaagtcgctaaagaagaaagggaaacacctactaatgatagtatgccgccattagtccgacaagttctggaattaaaggatcaccaaggtgcagagccagccttcttattcggccttgaattgatcatatgcggattagaaaaacaacttaaatgtgaaagtgggtcttaa

SEQ ID NO: 706 - DNA, 627 bp, Artificial sequence
  SuR L7-2E04 CDS
atgggatctagattagataaaagtaaagtgattaacagcgcattagagctgcttaatgaggtcggaatcgaaggtttaacaacccgtaaactcgcccagaagctaggtgtagagcagcctacattgtattggcatgtaaaaaataagcgagctctgctcgacgcaatggccattgagatgctggataggcacgcgactcactattgccctttagaaggggaaagctggcaagattttttacgtaataacgctaaaagtatgagatgtgctttactaagtcatcgcgatggagcaaaagtatgtttaggtacaggctttacagaacagcaatatgaaactgccgaaaatagtatggcctttttatgccaacaaggtttttcactagagaacgcaatgtatgcaatgcaggctgcttgtatttatactttaggttgcgtattgttggatcaagagcttcaagtcgctaaagaagaaagggaaacacctactactgatagtatgccgccattagtccgacaagttctggaattaaaggatcaccaaggtgcagagccagccttcttattcggccttgaattgatcatatgcggattagaaaaacaacttaaatgtgaaagtgggtcttaa

SEQ ID NO: 707 - DNA, 627 bp, Artificial sequence
  SuR L7-2F04 CDS
atgggatctagattagataaaagtaaagtgattaacagcgcattagagctgcttaatgaggtcggaatcgaaggtttaacaacccgtaaactcgcccagaagctaggtgtagagcagcctacattgtattggcatgtaaaaaataagcgagctctgctcgacgcattggccattgagatgctggataggcacgcgactcactattgccctttagaaggggaaagctggcaagattttttacgtaataacgctaaaagtatgagatgtgctttactaagtcatcgcgatggagcaaaagtatgtttaggtacaggctttacagaacagatgtatgaaactgccgaaaatagtatggcctttttatgccaacaaggtttttcactagagcacgcaatgtatgcaatgcaggctgttggtatttttactttaggttgcgtattgttggatcaagagcttcaagtcgctaaagaagaaagggaaacacctactactgatagtatgccgccattagtccgacaagctctggaattaaaggatcaccaaggtgcagagccagccttcttattcggccttgaattgatcatatgcggattagaaaaacaacttaaatgtgaaagtgggtcttaa

SEQ ID NO: 708 - DNA, 627 bp, Artificial sequence
  SuR L7-2H04 CDS
atgggatctagattagataaaagtaaagtgattaacagcgcattagagctgcttaatgaggtcggaatcgaaggtttaacaacccgtaaactcgcccagaagctaggtgtagagcagcctacattgtattggcatgtaaaaaataagcgagctctgctcgacgcaatggccattgagatgctggataggcacgcgactcacatctgccctttagaagaggaaagctggcaagattttttacgtaataacgctaaaagtatgagatgtgctttactaagtcatcgcgatggagcaaaagtatgtttaggtacaggctttacagaacagcaatatgaaactgccgaaaatagtatggcctttttatgtcaacaaggtttttcactagagcacgcaatgtatgcaatgcaggctgcttgtatttatactttaggttgcgtattgttggatcaagagcttcaagtcgctaaagaagaaagggaaacacctactactgatagtatgccgccattagtccgacaagttctggaattaaaggatcaccaaggtgcagagccagccttcttattcggccttgaattgatcatatgcggattagaaaaacaacttaaatgtgaaagtgggtcttaa

SEQ ID NO: 709 - DNA, 627 bp, Artificial sequence
  SuR L7-2B05 CDS
atgggatctagattagataaaagtaaagtgattaacagcgcattagagctgcttaatgaggtcggaatcgaaggtttaacaacccgtaaactcgcccagaagctaggtgtagagcagcctacattgtattggcatgtaaaaaataagcgagctctgctcgacgcaatggccattgagatgctggataggcacgcgactcactattgccctttagaaggggaaagctggcaagattttttacgtaataacgctaaaagtatgagatgtgctttactaagtcatcgcgatggagcaaaagtatgtttaggtacaggctttacagaacagcactatgaaactgccgaaaatagtatggcctttttatgccaacaaggtttttcactagagcacgcaatgtatgcaatgcaggctgctggtatttatactttaggttgcgtattgttggatcaagagcttcaagtcgctaaagaagaaagggaaacacctactactgatagtatgccgccattagtccgacaagctctggaattaaaggatcaccaaggtgcagagccagccttcttattcggccttgaattgatcatatgcggattagaaaaacaacttaaatgtgaaagtgggtcttaa

SEQ ID NO: 710 - DNA, 627 bp, Artificial sequence
  SuR L7-2D05 CDS
atgggatctagattagataaaagtaaagtgattaacagcgcattagagctgcttaatgaggtcggaatcgaaggtttaacaacccgtaaactcgcccagaagctaggtgtagagcagcctacattgtattggcatgtaaaaaataagcgagctctgctcgacgcaatggccattgagatgctggataggcacgcgactcactattgccctttagaaggggaaagctggcaagattttttacgtaataacgctagaagtatgagatgtgctttactaagtcatcgcgatggagcaaaagtatgtttaggtacaggctttacagaacagatgtatgaaactgccgaaaatagtctggcctttttatgccaacaaggtttttcactagagaacgcaatgtatgcaatgcaggctgctggtatttatactttaggttgcgtattgttggatcaagagcttcaagtcgctaaagaagaaagggaaacacctactactgatagtatgccgccattagtccgacaagttctggaattaaaggatcaccaaggtgcagagccagccttcttattcggccttgaattgatcatatgcggattagaaaaacaacttaaatgtgaaagtgggtcttaa

SEQ ID NO: 711 - DNA, 627 bp, Artificial sequence
  SuR L7-2E05 CDS
atgggatctagattagataaaagtaaagtgattaacagcgcattagagctgcttaatgaggtcggaatcgaaggtttaacaacccgtaaactcgcccagaagctaggtgtagagcagcctacattgtattggcatgtaaaaaataagcgagctctgctcgacgcaatggccattgagatgctggataggcacgcgactcactattgccctttagaaggggaaagctggcaagattttttacgtaataacgctaaaagtatgagatgtgctttactaagtcatcgcgatggagcaaaagtatgtttaggtacaggctttacagaacagcaatatgaaagtgccgaaaatagtctggcctttttatgccaacaaggtttttcactagagaacgcactgtatgcaatgcaggctgttggtatttatactttaggttgcgtattgttggatcaagagcttcaagtcgctaaagaagaaagggaaacacctactactgatagtatgccgccattactccgacaagctctggaattaaaggatcaccaaggtgcagagccagccttcttattcggccttgaattgatcatatgcggattagaaaaacaacttaaatgtgaaagtgggtcttaa

SEQ ID NO: 712 - DNA, 627 bp, Artificial sequence
  SuR L7-2F05 CDS
atgggatctagattagataaaagtaaagtgattaacagcgcattagagctgcttaatgaggtcggaatcgaaggtttaacaacccgtaaactcgcccagaagctaggtgtagagcagcctacattgtattggcatgtaaaaaataagcgagctctgctcgacgcattggccattgagatgctggataggcacgcgactcactattgccctttagaaggggaaagctggcaagattttttacgtaataacgctaaaagtatgagatgtgctttactaagtcatcgcgatggagcaaaagtatgtttaggtacaggctttacagaaaagcaatatgaaagtgccgaaaatagtatggcctttttatgccaacaaggtttttcactagagcacgcactgtatgcaatgcaggctgttggtatttttactttaggttgcgtattgttggatcaagagcttcaagtcgctaaagaagaaagggaaacacctactactgatagtatgccgccattagtccgacaagttctggaattaaaggatcaccaaggtgcagagccagccttcttattcggccttgaattgatcatatgcggattagaaaaacaacttaaatgtgaaagtgggtcttaa

SEQ ID NO: 713 - DNA, 627 bp, Artificial sequence
  SuR L7-2H05 CDS
atgggatctagattagataaaagtaaagtgattaacagcgcattagagctgcttaatgaggtcggaatcgaaggtttaacaacccgtaaactcgcccagaagctaggtgtagagcagcctacattgtattggcatgtaaaaaataagcgagctctgctcgacgcaatggccattgagatgctggataggcacgcgactcactattgccctttagaaggggaaagctggcaagattttttacgtaataacgctaaaagtatgagatgtgctttactaagtcatcgcgatggagcaaaagtatgtttaggtacaggctttacagaacagcaatatgaaagtgccgaaaatagtatggcctttttatgccaacaaggtttttcactagagcacgcactgtatgcaatgcaggctgctggtatttatactttaggttgcgtattgttgaatcaagagcttcaagtcgctaaagaagaaagggaaacacctactactgatagtatgccgccattagtccgacaaggtctggaattaaaggatcaccaaggtgcagagccagccttcttattcggccttgaattgatcatatgcggattagaaaaacaacttaaatgtgaaagtgggtcttaa

SEQ ID NO: 714 - DNA, 627 bp, Artificial sequence
  SuR L7-2A06 CDS
atgggatctagattagataaaagtaaagtgattaacagcgcattagagctgcttaatgaggtcggaatcgaaggtttaacaacccgtaaactcgcccagaagctaggtgtagagcagcctacattgtattggcatgtaaaaaataagcgagctctgctcgacgcaatggccattgagatgctggatagtcacgcgactcactattgccctttagaaggggaaagctggcaagattttttacgtaataacgctaaaagtatgagatgtgctttactaagtcatcgcgatggagcaaaagtatgtttaggtacaggctttacagaacagcaatatgaaactgccgaaaatagtatggcctttttatgccaacaaggtttttcactagagcacgcaatgtatgcaatgcaggctgctggtatttttactttaggttgcgtattgttggatcaagagcttcaagtcgctaaagaagaaagggaaacacctactactgatagtatgccgccattagtccgacaaggtctggaattaaaggatcaccaaggtgcagagccagccttcttattcggccttgaattgatcatatgcggattagaaaaacaacttaaatgtgaaagtgggtcttaa

SEQ ID NO: 715 - DNA, 627 bp, Artificial sequence
  SuR L7-2C06 CDS
atgggatctagattagataaaagtaaagtgattaacagcgcattagagctgcttaatgaggtcggaatcgaaggtttaacaacccgtaaactcgcccagaagctaggtgtagagcagcctacattgtattggcatgtaaaaaataagcgagctctgctcgacgcaatggccattgagatgctggataggcacgcgactcactattgccctttagaaggggaaagctggccagattttttacgtaataacgctaaaagtatgagatgtgctttactaagtcatcgcgatggagcaaaagtatgtttaggtacaggctttacagaacagcaatatgaaactgccgaaaatagtctggcctttttatgccaacaaggtttttcactagagcacgcactgtatgcaatgcaggctgttggtatttatactttaggttgcgtattgttggatcaagagcttcaagtcgctaaagaagaaagggaaacacctactactgatagtatgccgccattactccgacaaggtctggaattaaaggatcaccaaggtgcagagccagccttcttattcggccttgaattgatcatatgcggattagaaaaacaacttaaatgtgaaagtgggtcttaa

SEQ ID NO: 716 - DNA, 627 bp, Artificial sequence
  SuR L7-2D06 CDS
atgggatctagattagataaaagtaaagtgattaacagcgcattagagctgcttaatgaggtcggaatcgaaggtttaacaacccgtaaactcgcccagaagctaggtgtagagcagcctacattgtattggcatgtaaaaaataagcgagctctgctcgacgcaatggccattgagatgctggataggcacgcgactcactattgccctttagaaggggaaagctggcaagattttttacgtaataacgctaaaagtatgagatgtgctttactaagtcatcgcgatggagcaaaagtatgtttaggtacaggctttacagaacagcaatatgaaagtgccgaaaatagtctggcctttttatgccaacaaggtttttcactagagaacgcactgtatgcaatgcaggctgttggtatttttactttaggttgcgtattgttggatcaagagcttcaagtcgctaaagaagaaagggaaacacctactactgatagtatgccgccattagtccgacaagctctggaattaaaggatcaccaaggtgcagagccagccttcttattcggccttgaattgatcatatgcggattagaaaaacaacttaaatgtgaaagtgggtcttaa

SEQ ID NO: 717 - DNA, 627 bp, Artificial sequence
  SuR L7-2F06 CDS
atgggatctagattagataaaagtaaagtgattaacagcgcattagagctgcttaatgaggtcggaatcgaaggtttaacaacccgtaaactcgcccagaagctaggtgtagagcagcctacattgtattggcatgtaaaaaataagcgagctctgctcgacgcattggccattgagatgctggataggcacgcgactcactattgccctttagaaggggaaagctggcaagattttttacgtaataacgctaaaagtatgagatgtgctttactaagtcatcgcgatggagcaaaagtatgtttaggtacaggctttacagaaaagcaatatgaaactgccgaaaatagtctggcctttttatgccaacaaggtttttcactagagcacgcactgtatgcaatgcaggctgttggtatttatactttaggttgcgtattgttggatcaagagcttcaagtcgctaaagaagaaagggaaacacctactactgatagtatgccgccattagtccgacaaggtctggaattaaaggatcaccaaggtgcagagccagccttcttattcggccttgaattgatcatatgcggattagaaaaacaacttaaatgtgaaagtgggtcttaa

SEQ ID NO: 718 - DNA, 627 bp, Artificial sequence
  SuR L7-2G06 CDS
atgggatctagattagataaaagtaaagtgattaacagcgcattagagctgcttaatgaggtcggaatcgaaggtttaacaacccgtaaactcgcccagaagctaggtgtagagcagcctacattgtattggcatgtaaaaaataagcgagctctgctcgacgcaatggccattgagatgctggataggcacgcgactcactattgccctttagaaggggaaagctggcaagattttttacgtaataacgctaaaagtatgagatgtgctttactaagtcatcgcgatggagcaaaagtatgtttaggtacaggctttacagaacagcaatatgaaactgccgaaaatagtatggcctttttatgccaacaaggtttttcactagagcacgcactgtatgcaatgcaggctgttggtatttatactttaggttgcgtattgttggatcaagagcttcaagtcgctaaagaagaaagggaaacacctactactgatagtatgccgccattagtccgacaaggtctggaattaaaggatcaccaaggtgcagagccagccttcttattcggccttgaattgatcatatgcggattagaaaaacaacttaaatgtgaaagtgggtcttaa

SEQ ID NO: 719 - DNA, 627 bp, Artificial sequence
  SuR L7-2A07 CDS
  misc_feature (328)..(328): n is a, c, g, or t
  misc_feature (422)..(422): n is a, c, g, or t
  misc_feature (521)..(521): n is a, c, g, or t
atgggatctagattagataaaagtaaagtgattaacagcgcattagagctgcttaatgaggtcggaatcgaaggtttaacaacccgtaaactcgcccagaagctaggtgtagagcagcctacattgtattggcatgtaaaaaataagcgagctctgctcgacgcaatggccattgagatgctggataggcacgcgactcactattgccctttagaaggggaaagctggcaagattttttacgtaataacgctaaaagtatgagatgtgctttactaagtcatcgcgatggagcaaaagtatgtttaggtacaggctttacagaacagntgtatgaagctgccgaaaatagtctggcctttttatgccaacaaggtttttcactagagcacgcactgtatgcaatgcaggctgttggtatttntactttaggttgcgtattgttggatcaagagcttcaagtcgctaaagaagaaagggaaacacctactactgatagtatgccgccattagtccgacaagntctggaattaaaggatcaccaaggtgcagagccagccttcttattcggccttgaattgatcatatgcggattagaaaaacaacttaaatgtgaaagtgggtcttaa

SEQ ID NO: 720 - DNA, 627 bp, Artificial sequence
  SuR L7-2B07 CDS
atgggatctagattagataaaagtaaagtgattaacagcgcattagagctgcttaatgaggtcggaatcgaaggtttaacaacccgtaaactcgcccagaagctaggtgtagagcagcctacattgtattggcatgtaaaaaataagcgagctctgctcgacgcattggccattgagatgctggataggcacgcgactcactattgccctttagaaggggaaagctggcaagattttttacgtaataacgctaaaagtatgagatgtgctttactaagtcatcgcgatggagcaaaagtatgtttaggtacaggctttacagaacagcactatgaaactgccgaaaatagtatggcctttttatgccaacaaggtttttcactagagcacgcaatgtatgcaatgcaggctgctggtatttttactttaggttgcgtattgttggatcaagagcttcaagtcgctaaagaagaaagggaaacacctactactgatagtatgccgccattagtccgacaaggtctggaattaaaggatcaccaaggtgcagagccagccttcttattcggccttgaattgatcatatgcggattagaaaaacaacttaaatgtgaaagtgggtcttaa

SEQ ID NO: 721 - DNA, 627 bp, Artificial sequence
  SuR L7-2C07 CDS
atgggatctagattagataaaagtaaagtgattaacagcgcattagagctgcttaatgaggtcggaatcgaaggtttaacaacccgtaaactcgcccagaagctaggtgtagagcagcctacattgtattggcatgtaaaaaataagcgagctctgctcgacgcaatggccattgagatgctggataggcacgcgactcactattgccctttagaaggggaaagctggcaagattttttacgtaataacgctaaaagtatgagatgtgctttactaagtcatcgcgatggagcaaaagtatgtttaggtacaggctttacagaacagcaatatgaaactgccgaaaatagtctggcctttttatgccaacaaggtttttcactagagcacgcaatgtatgcaatgcaggctgttggtatttttactttaggttgcgtattgttggatcaagagcttcaagtcgctaaagaagaaagggaaacacctactactgatagtatgccgccattagtccgacaaggtctggaattaaaggatcaccaaggtgcagagccagccttcttattcggccttgaattgatcatatgcggattagaaaaacaacttaaatgtgaaagtgggtcttaa

SEQ ID NO: 722 - DNA, 627 bp, Artificial sequence
  SuRL7-2D07 CDS
atgggatctagattagataaaagtaaagtgattaacagcgcattagagctgcttaatgaggtcggaatcgaaggtttaacaacccgtaaactcgcccagaagctaggtgtagagcagcctacattgtattggcatgtaaaaaataagcgagctctgctcgacgcattggccattgagatgctggataggcacgcgactcactattgccctttagaaggggaaagctggcaagattttttacgtaataacgctaaaagtatgagatgtgctttactaagtcatcgcgatggagcaaaagtatgtttaggtacaggctttacagaaaagcaatatgaaactgccgaaaatagtctggcctttttatgccaacaaggtttttcactagagaacgcactgtatgcaatgcaggctgctggtatttatactttaggttgcgtattgttggatcaagagcttcaagtcgctaaagaagaaagggaaacacctactactgatagtatgccgccattagtccgacaagttctggaattaaaggatcaccaaggtgcagagccagccttcttattcggccttgaattgatcatatgcggattagaaaaacaacttaaatgtgaaagtgggtcttaa

SEQ ID NO: 723 - DNA, 627 bp, Artificial sequence
  SuR L7-2E07 CDS
atgggatctagattagataaaagtaaagtgattaacagcgcattagagctgcttaatgaggtcggaatcgaaggtttaacaacccgtaaactcgcccagaagctaggtgtagagcagcctacattgtattggcatgtaaaaaataagcgagctctgctcgacgcattggccattgagatgctggataggcacgcgactcactattgccctttagaaggggaaagctggcaagattttttacgtaataacgctaaaagtatgagatgtgctttactaagtcatcgcgatggagcaaaagtatgtttaggtacaggctttacagaacagcaatatgaagctgccgaaaatagtatggcctttttatgccaacaaggtttttcactagagcacgcaatgtatgcaatgcaggctgctggtatttatactttaggttgcgtattgttggatcaagagcttcaagtcgctaaagaagaaagggaaacacctactactgatagtatgccgccattactccgacaagctctggaattaaaggatcaccaaggtgcagagccagccttcttattcggccttgaattgatcatatgcggattagaaaaacaacttaaatgtgaaagtgggtcttaa

SEQ ID NO: 724 - DNA, 627 bp, Artificial sequence; identical to SEQ ID NO: 713
  SuR L7-2G07 CDS

SEQ ID NO: 725 - DNA, 627 bp, Artificial sequence
  SuR L7-2B08 CDS
  misc_feature (203)..(204): n is a, c, g, or t
  misc_feature (337)..(337): n is a, c, g, or t
atgggatctagattagataaaagtaaagtgattaacagcgcattagagctgcttaatgaggtcggaatcgaaggtttaacaacccgtaaactcgcccagaagctaggtgtagagcagcctacattgtattggcatgtaaaaaataagcgagctctgctcgacgcaatggccattgagatgctggataggcacgcgactcactnntgccctttagaaggggaaagctggcaagattttttacgtaataacgctaaaagtatgagatgtgctttactaagtcatcgcgatggagcaaaagtatgtttaggtacaggctttacagaacagatgtatgaangtgccgaaaatagtatggcctttttatgccaacaaggtttttcactagagmacgcaatgtatgcaatgcaggctgttggtatttttactttaggttgcgtattgttggatcaagagcttcaagtcgctaaagaagaaagggaaacacctactactgatagtatgccgccattagyccgacaagttctggaattaaaggatcaccaaggtgcagagccagccttcttattcggccttgaattgatcatatgcggattagaaaaacaacttaaatgtgaaagtgggtcttaa

SEQ ID NO: 726 - DNA, 627 bp, Artificial sequence
  SuR L7-2D08 CDS
atgggatctagattagataaaagtaaagtgattaacagcgcattagagctgcttaatgaggtcggaatcgaaggtttaacaacccgtaaactcgcccagaagctaggtgtagagcagcctacattgtattggcatgtaaaaaataagcgagctctgctcgacgcaatggccattgagatgctggataggcacgcgactcactattgccctttagaaggggaaagctggcaagattttttacgtaataacgctaaaagtatgagatgtgctttactaagtcatcgcgatggagcaaaagtatgtttaggtacaggctttacagaacagcaatatgaaactgccgaaaatagtctggcctttttatgccaacaaggtttttcactagagcacgcactgtatgcaatgcaggctgttggtatttatactttaggttgcgtattgttggatcaagagcttcaagtcgctaaagaagaaagggaaacacctactactgatagtatgccgccattagtccgacaagctctggaattaaaggatcaccaaggtgcagagccagccttcttattcggccttgaattgatcatatgcggattagaaaaacaacttaaatgtgaaagtgggtcttaa

SEQ ID NO: 727 - DNA, 627 bp, Artificial sequence
  SuR L7-2F08 CDS
atgggatctagattagataaaagtaaagtgattaacagcgcattagagctgcttaatgaggtcggaatcgaaggtttaacaacccgtaaactcgcccagaagctaggtgtagagcagcctacattgtattggcatgtaaaaaataagcgagctctgctcgacgcaatggccattgagatgctggataggcacgcgactcactattgccctttagaaggggaaagctggcaagattttttacgtaataacgctaaaagtatgagatgtgctttactaagtcatcgcgatggagcaaaagtatgtttaggtacaggctttacagaacagcaatatgaaactgccgaaaatagtatggcctttttatgccaacaaggtttttcactagagcacgcaatgtatgcaatgcaggctgcttgtatttttactttaggttgcgtattgttggatcaagagcttcaagtcgctaaagaagaaagggaaacacctactactgatagtatgccgccattagtccgacaagttctggaattaaaggatcaccaaggtgcagagccagccttcttattcggccttgaattgatcatatgcggattagaaaaacaacttaaatgtgaaagtgggtcttaa

SEQ ID NO: 728 - DNA, 627 bp, Artificial sequence
  SuR L7-2G08 CDS
atgggatctagattagataaaagtaaagtgattaacagcgcattagagctgcttaatgaggtcggaatcgaaggtttaacaacccgtaaactcgcccagaagctaggtgtagagcagcctacattgtattggcatgtaaaaaataagcgagctctgctcgacgcattggccattgagatgctggataggcacgcgactcactattgccctttagaaggggaaagctggcaagattttttacgtaataacgctaaaagtatgagatgtgctttactaagtcatcgcgatggagcaaaagtatgtttaggtacaggctttacagaacagatgtatgaaactgccgaaaatagtctggcctttttatgccaacaaggtttttcactagagcacgcactgtatgcaatgcaggctgttggtatttttactttaggttgcgtattgttggatcaagagcttcaagtcgctaaagaagaaagggaaacacctactactgatagtatgccgccattagtccgacaaggtctggaattaaaggatcaccaaggtgcagagccagccttcttattcggccttgaattgatcatatgcggattagaaaaacaacttaaatgtgaaagtgggtcttaa

SEQ ID NO: 729 - DNA, 627 bp, Artificial sequence
  SuR L7-2B09 CDS
atgggatctagattagataaaagtaaagtgattaacagcgcattagagctgcttaatgaggtcggaatcgaaggtttaacaacccgtaaactcgcccagaagctaggtgtagagcagcctacattgtattggcatgtaaaaaataagcgagctctgctcgacgcaatggccattgagatgctggataggcacgcgactcacatgtgccctttagaaggggaaagctggcaagattttttacgtaataacgctaaaagtatgagatgtgctttactaagtcatcgcgatggagcaaaagtatgtttaggtacaggctttacagaacagatgtatgaaagtgccgaaaatagtatggcctttttatgccaacaaggtttttcactagagaacgcaatgtatgcaatgcaggctgttggtatttttactttaggttgcgtattgttggatcaagagcttcaagtcgctaaagaagaaagggaaacacctactactgatagtatgccgccattagctcgacaagttctggaattaaaggatcaccaaggtgcagagccagccttcttattcggccttgaattgatcatatgcggattagaaaaacaacttaaatgtgaaagtgggtcttaa

SEQ ID NO: 730 - DNA, 627 bp, Artificial sequence
  SuR L7-2C09 CDS
atgggatctagattagataaaagtaaagtgattaacagcgcattagagctgcttaatgaggtcggaatcgaaggtttaacaacccgtaaactcgcccagaagctaggtgtagagcagcctacattgtattggcatgtaaaaaataagcgagctctgctcgacgcaatggccattgagatgctggataggcacgcgactcacatgtgccctttagaaggggaaagctggcaagattttttacgtaataacgctaaaagtatgagatgtgctttactaagtcatcgcgatggagcaaaagtatgtttaggtacaggctttacagaacagatgtatgaaactgccgaaaatagtatggcctttttatgccaacaaggtttttcactagagaacgcaatgtatgcaatgcaggctgctggtatttatactttaggttgcgtattgttggatcaagagcttcaagtcgctaaagaagaaagggaaacacctactactgatagtatgccgccattagtccgacaagttctggaattaaaggatcaccaaggtgcagagccagccttcttattcggccttgaattgatcatatgcggattagaaaaacaacttaaatgtgaaagtgggtcttaa

SEQ ID NO: 731 - DNA, 627 bp, Artificial sequence
  SuR L7-2E09 CDS
atgggatctagattagataaaagtaaagtgattaacagcgcattagagctgcttaatgaggtcggaatcgaaggtttaacaacccgtaaactcgcccagaagctaggtgtagagcagcctacattgtattggcatgtaaaaaataagcgagctctgctcgacgcattggccattgagatgctggataggcacgcgactcactattgccctttagaaggggaaagctggcaagattttttacgtaataacgctaaaagtatgagatgtgctttactaagtcatcgcgatggagcaaaagtatgtttaggtacaggctttacagaacagatgtatgaaagtgccgaaaatagtctggcctttttatgccaacaaggtttttcactagagaacgcaatgtatgcaatgcaggctgctggtatttttactttaggttgcgtattgttggatcaagagcttcaagtcgctaaagaagaaagggaaacacctactactgatagtatgccgccattagtccgacaagttctggaattaaaggatcaccaaggtgcagagccagccttcttattcggccttgaattgatcatatgcggattagaaaaacaacttaaatgtgaaagtgggtcttaa

SEQ ID NO: 732 - DNA, 627 bp, Artificial sequence
  SuR L7-2B10 CDS
atgggatctagattagataaaagtaaagtgattaacagcgcattagagctgcttaatgaggtcggaatcgaaggtttaacaacccgtaaactcgcccagaagctaggtgtagagcagcctacattgtattggcatgtaaaaaataagcgagctctgctcgacgcaatggccattgagatgctggataggcacgcgactcacttctgccctttagaaggggaaagctggcaagattttttacgtaataacgctaaaagtatgagatgtgctttactaagtcatcgcgatggagcaaaagtatgtttaggtacaggctttacagaacagcaatatgaaggtgccgaaaatagtatggcctttttatgccaacaaggtttttcactagagaacgcaatgtatgcaatgcaggctgctggtatttttactttaggttgcgtattgttggatcaagagcttcaagtcgctaaagaagaaagggaaacacctactactgatagtatgccgccattagtccgacaagttctggaattaaaggatcaccaaggtgcagagccagccttcttattcggccttgaattgatcatatgcggattagaaaaacaacttaaatgtgaaagtgggtcttaa

SEQ ID NO: 733 - DNA, 627 bp, Artificial sequence
  SuR L7-2E10 CDS
  misc_feature (244)..(244): n is a, c, g, or t
  misc_feature (521)..(521): n is a, c, g, or t
atgggatctagattagmyaaaagtaaagtgattaacagcgcattagagctgcttaatgaggtcggaatcgaaggtttaacaacccgtaaactcgcccagaagctaggtgtagagcagcctacattgtattggcatgtaaaaaataagcgagctctgctcgacgcattggccattgagatgctggataggcacgcgactcactattgccctttagaaggggaaagctggcaagattttttacgtnataacgctaaaagtatgagatgtgctttactaagtcatcgcgatggagcaaaagtatgtttaggtacaggctttacagaacagmtgtatgaaactgccgaaaatagtctggcctttttatgccaacaaggtttttcactagagmacgcactgtatgcaatgcaggctgttggtatttatactttaggttgcgtattgttggatcaagagcttcaagtcgctaaagaagaaagggaaacacctactactgatagtatgccgccattactccgacaagntctggaattaaaggatcaccaaggtgcagagccagccttcttattcggccttgaattgatcatatgcggattagaaaaacaacttaaatgtgaaagtgggtcttaa

SEQ ID NO: 734 - DNA, 627 bp, Artificial sequence
  SuR L7-2G10 CDS
  misc_feature (573)..(573): n is a, c, g, or t
atgggatctagattagataaaagtaaagtgattaacagcgcattagagctgcttaatgaggtcggaatcgaaggtttaacaacccgtaaactcgcccagaagctaggtgtagagcagcctacattgtattggcatgtaaaaaataagcgagctctgctcgacgcaatggccattgagatgctggataggcacgcgactcactattgccctttagaaggggaaagctggcaagattttttacgtaataacgctaaaagtatgagatgtgctttactaagtcatcgcgatggagcaaaagtatgtttaggtacaggctttacagaacagcaatatgaaactgccgaaaatagtatggcctttttatgccaacaaggtttttcactagagcacgcactgtatgcaatgcaggctgctggtatttatactttaggttgcgtattgttggatcaagagcttcaagtcgctaaagaagaaagggaaacacctactactgatagtatgccgccattactccgacaaggtctggaattaaaggatcaccaaggtgcagagccagccttcttattcggcctngaattgatcatatgcggattagaaaaacaacttaaatgtgaaagtgggtcttaa

SEQ ID NO: 735 - DNA, 627 bp, Artificial sequence
  SuR L7-2C11 CDS
atgggatctagattagataaaagtaaagtgattaacagcgcattagagctgcttaatgaggtcggaatcgaaggtttaacaacccgtaaactcgcccagaagctaggtgtagagcagcctacattgtattggcatgtaaaaaataagcgagctctgctcgacgcaatggccattgagatgctggataggcacgcgactcactattgccctttagaaggggaaagctggcaagattttttacgtaataacgctaaaagtatgagatgtgctttactaagtcatcgcgatggagcaaaagtatgtttaggtacaggctttacagaacagcaatatgaaactgccgaaaatagtatggcctttttatgccaacaaggtttttcactagagaacgcaatgtatgcaatgcaggctgctggtatttttactttaggttgcgtattgttggatcaagagcttcaagtcgctaaagaagaaagggaaacacctactactgatagtatgccgccattagtccgacaagttctggaattaaaggatcaccaaggtgcagagccagccttcttattcggccttgaattgatcatatgcggattagaaaaacaacttaaatgtgaaagtgggtcttaa

SEQ ID NO: 736 - DNA, 627 bp, Artificial sequence
  SuR L7-2D11 CDS
atgggatctagattagataaaagtaaagtgattaacagcgcattagagctgcttaatgaggtcggaatcgaaggtttaacaacccgtaaactcgcccagaagctaggtgtagagcagcctacattgtattggcatgtaaaaaataagcgagctctgctcgacgcaatggccattgagatgctggataggcacgcgactcactattgccctttagaaggggaaagctggcaagattttttacgtaataacgctagaagtatgagatgtgctttactaagtcatcgcgatggagcaaaagtatgtttaggtacaggctttacagaacagatgtatgaaactgccgaaaatagtctggcctttttatgccaacaaggtttttcactagagaacgcactgtatgcaatgcaggctgctggtatttatactttaggttgcgtattgttggatcaagagcttcaagtcgctaaagaagaaagggaaacacctactactgatagtatgccgccattagtccgacaagttctggaattaaaggatcaccaaggtgcagagccagccttcttattcggccttgaattgatcatatgcggattagaaaaacaacttaaatgtgaaagtgggtcttaa

SEQ ID NO: 737 - DNA, 627 bp, Artificial sequence
  SuR L7-2F11 CDS
atgggatctagattagataaaagtaaagtgattaacagcgcattagagctgcttaatgaggtcggaatcgaaggtttaacaacccgtaaactcgcccagaagctaggtgtagagcagcctacattgtattggcatgtaaaaaataagcgagctctgctcgacgcattggccattgagatgctggataggcacgcgactcactattgccctttagaaggggaaagctggcaagattttttacgtaataacgctaaaagtatgagatgtgctttactaagtcatcgcgatggagcaaaagtatgtttaggtacaggctttacagaacagatgtatgaaactgccgaaaatagtctggcctttttatgccaacaaggtttttcactagagaacgcactgtatgcaatgcaggctgctggtatttttactttaggttgcgtattgttggatcaagagcttcaagtcgctaaagaagaaagggaaacacctactactgatagtatgccgccattagtccgacaagctctggaattaaaggatcaccaaggtgcagagccagccttcttattcggccttgaattgatcatatgcggattagaaaaacaacttaaatgtgaaagtgggtcttaa

SEQ ID NO: 738 - DNA, 627 bp, Artificial sequence
  SuR L7-2G11 CDS
atgggatctagattagataaaagtaaagtgattaacagcgcattagagctgcttaatgaggtcggaatcgaaggtttaacaacccgtaaactcgcccagaagctaggtgtagagcagcctacattgtattggcatgtaaaaaataagcgagctctgctcgacgcaatggccattgagatgctggataggcacgcgactcactattgccctttagaaggggaaagctggcaagattttttacgtaataacgctaaaagtatgagatgtgctttactaagtcatcgcgatggagcaaaagtatgtttaggtacaggctttacagaacagcaatatgaaagtgccgaaaatagtatggcctttttatgccaacaaggtttttcactagagcacgcaatgtatgcaatgcaggctgctggtatttatactttaggttgcgtattgttggatcaagagcttcaagtcgctaaagaagaaagggaaacacctactactgatagtatgccgccattactccgacaagttctggaattaaatgatcaccaaggtgcagagccagccttcttattcggccttgaattgatcatatgcggattagaaaaacaacttaaatgtgaaagtgggtcttaa

SEQ ID NO: 739 - DNA, 627 bp, Artificial sequence; identical to SEQ ID NO: 738
  SuR L7-2B12 CDS

SEQ ID NO: 740 - DNA, 627 bp, Artificial sequence
  SuR L7-2C12 CDS
atgggatctagattagataaaagtaaagtgattaacagcgcattagagctgcttaatgaggtcggaatcgaaggtttaacaacccgtaaactcgcccagaagctaggtgtagagcagcctacattgtattggcatgtaaaaaataagcgagctctgctcgacgcaatggcctttgagatgctggataggcacgcgactcactattgccctttagaaggggaaagctggcaagattttttacgtaataacgctaaaagtatgagatgtgctttactaagtcatcgcgatggagcaaaagtatgtttaggtacaggctttacagaacagcaatatgaaactgccgaaaatagtatggcctttttatgccaacaaggtttttcactagagaacgcactgtatgcaatgcaggctgtttgtatttatactttaggttgcgtattgttggatcaagagcttcaagtcgctaaagaagaaagggaaacacctactactgatagtatgccgccattactccgacaagctctggaaataaaggatcaccaaggtgcagagccagccttcttattcggccttgaattgatcatatgcggattagaaaaacaacttaaatgtgaaagtgggtcytaa

SEQ ID NO: 741 - DNA, 627 bp, Artificial sequence
  SuR L7-2D12 CDS
atgggatctagattagataaaagtaaagtgattaacagcgcattagagctgcttaatgaggtcggaatcgaaggtttaacaacccgtaaactcgcccagaagctaggtgtagagcagcctacattgtattggcatgtaaaaaataagcgagctctgctcgacgcaatggccattgagatgctggataggcacgcgactcactattgccctttagaaggggaaagctggcaagattttttacgtaataacgctaaaagtatgagatgtgctttactaagtcatcgcgatggagcaaaagtatgtttaggtacaggctttacagaacagcaatatgaaactgccgaaaatagtctggcctttttatgccaacaaggtttttcactagagcacgcactgtatgcaatgcaggctgttggtatttatactttaggctgcgtattgttggatcaagagcttcaagtcgctaaagaagaaagggaaacacctactactgatagtatgccgccattagtccgacaaggtctggaattaaaggatcaccaaggtgcagagccagccttcttattcggccttgaattgatcatatgcggattagaaaaacaacttaaatgtgaaagtgggtcttaa

SEQ ID NO: 742 - DNA, 627 bp, Artificial sequence
  SuR L7-2F12 CDS
atgggatctagattagataaaagtaaagtgattaacagcgcattagagctgcttaatgaggtcggaatcgaaggtttaacaacccgtaaactcgcccagaagctaggtgtagagcagcctacattgtattggcatgtaaaaaataagcgagctctgctcgacgcattggccattgagatgctggataggcacgcgactcacgtgtgccctttagaaggggaaagctggcaagattttttacgtaataccgctaaaagtatgagatgtgctttactaagtcatcgcgatggagcaaaagtatgtttaggtacaggctttacagaacagcaatatgaagctgccgaaaatagtatggcctttttatgccaacaaggtttttcactagagcacgcgctgtatgcaatgcaggctgctggtatttttactttaggttgcgtattgttggatcaagagcttcaagtcgctaaagaagaaagggaaacacctactactgatagtatgccgccattagtccgacaagttctggaattaaaggatcaccaaggtgcagagccagccttcttattcggccttgaattgatcatatgcggattagaaaaacaacttaaatgtgaaagtgggtcttaa

SEQ ID NO: 743 - DNA, 627 bp, Artificial sequence
  SuR L7-2G12 CDS
atgggatctagattagataaaagtaaagtgattaacagcgcattagagctgcttaatgaggtcggaatcgaaggtttaacaacccgtaaactcgcccagaagctaggtgtagagcagcctacattgtattggcatgtaaaaaataagcgagctctgctcgacgcaatggccattgagatgctggataggcacgcgactcacatctgccctttagaaggggaaagctggcaagattttttacgtaataacgctaaaagtatgagatgtgctttactaagtcatcgcgatggagcaaaagtatgtttaggtacaggctttacagaacagcaatatgaagctgccgaaaatagtctggcctttttatgccaacaaggtttttcactagagcacgcactgtatgcaatgcaggctgttggtatttatactttaggttgcgtattgttggatcaagagcttcaagtcgctaaagaagaaagggaaacacctactactgatagtatgccgccattagtccgacaagctctggaattaaaggatcaccaaggtgcagagccagccttcttattcggccttgaattgatcatatgcggattagaaaaacaacttaaatgtgaaagtgggtcttaa

SEQ ID NO: 744 - DNA, 627 bp, Artificial sequence
  SuR L7-3A01 CDS
atgggatctagattagataaaagtaaagtgattaacagcgcattagagctgcttaatgaggtcggaatcgaaggtttaacaacccgtaaactcgcccagaagctaggtgtagagcagcctacattgtattggcatgtaaaaaataagcgagctctgctcgacgcattggccattgagatgctggataggcacgcgactcactattgccctttagaaggggaaagctggcaagattttttacgtaataacgctaaaagtatgagatgtgctttactaagtcatcgcgatggagcaaaagtatgtttaggtacaggctttacagaaaagcaatatgaaactgccgaaaatagtctggcctttttatgccaacaaggtttttcactagagaacgcactgtatgcaatgcaggctgttggtatttttactttaggttgcgtattgttggatcaagagcttcaagtcgctaaagaagaaagggaaacacctactactgatagtatgccgccattagtccgacaagctctggaattaaaggatcaccaaggtgcagagccagccttcttattcggccttgaattgatcatatgcggattagaaaaacaacttaaatgtgaaagtgggtcttaa

SEQ ID NO: 745 - DNA, 627 bp, Artificial sequence
  SuR L7-3C01 CDS
atgggatctagattagataaaagtaaagtgattaacagcgcattagagctgcttaatgaggtcggaatcgaaggtttaacaacccgtaaactcgcccagaagctaggtgtagagcagcctacattgtattggcatgtaaaaaataagcgagctctgctcgacgcaatggccattgagatgctggataggcacgcgactcacttgtgccctttagaaggggaaagctggcaagattttttacgtaataacgctaaaagtatgagaagtgctttactaattcatcgcgatggagcaaaagtatgtttaggtacaggctttacagaacagcaatatgaagctgccgaaaatagtatggcctttttatgccaacaaggtttttcactagagaacgcaatgtatgcaatgcaggctgttggtatttatactttaggttgcgtattgttggatcaagagcttcaagtcgctaaagaagaaagggaaacacctactactgatcgtatgccgccattagctcgacaagctctggaattaaaggatcaccaaggtgcagagccagccttcttattcggccttgaattgatcatatgcggattagaaaaacaacttaaatgtgaaagtgggtcttaa

SEQ ID NO: 746 - DNA, 627 bp, Artificial sequence
  SuR L7-3G01 CDS
atgggatctagattagataaaagtaaagtgattaacagcgcattagagctgcttaatgaggtcggaatcgaaggtttaacaacccgtaaactcgcccagaagctaggtgtagagcagcctacattgtattggcatgtaaaaaataagcgagctctgctcgacgcaatggccattgagatgctggataggcacgcgactcactattgccctttagaaggggaaagctggcaagattttttacgtaataacgctaaaagtatgagatgtgctttactaagtcatcgcgatggagcaaaagtatgtttaggtacaggctttacagaacagcaatatgaagctgccgaaaatagtctggcctttttatgccaacaaggtttttcactagagaacgcaatgtatgcaatgcaggctgctggtatttatactttaggttgcgtattgttggatcaagagcttcaagtcgctaaagaagaaagggaaacacctactactgatagtatgccgccattagtccgacaaggtctggaattaaaggatcaccaaggtgcagagccagccttcttattcggccttgaattgatcatatgcggattagaaaaacaacttaaatgtgaaagtgggtcttaa

SEQ ID NO: 747 - DNA, 627 bp, Artificial sequence
  SuR L7-3H01 CDS
atgggatctagattagataaaagtaaagtgattaacagcgcattagagctgcttaatgaggtcggaatcgaaggtttaacaacccgtaaactcgcccagaagctaggtgtagagcagcctacattgtattggcatgtaaaaaataagcgagctctgctcgacgcaatggccattgagatgctggataggcacgcgactcactattgccctttagaaggggaaagctggcaagattttttacgtaataacgctaaaagtatgagatgtgctttactaagtcatcgcgatggagcaaaagtatgtttaggtacaggctttacagaacagcaatatgaagctgccgaaaatagtatggcctttttatgccaacaaggtttttcactagagaacgcaatgtattcaatgcaggctgttggtatttttactttaggttgcgtattgttggatcaagagcttcaagtcgctaaagaagaaagggaaacacctactactgatagtatgccgccattagtccgacaaggtctggaattaaaggatcaccaaggtgcagagccagccttcttattcggccttgaattgatcatatgcggattagaaaaacaacttaaatgtgaaagtgggtcttaa

SEQ ID NO: 748 - DNA, 627 bp, Artificial sequence
  SuR L7-3A02 CDS
atgggatctagattagataaaagtaaagtgattaacagcgcattagagctgcttaatgaggtcggaatcgaaggtttaacaacccgtaaactcgcccagaagctaggtgtagagcagcctacattgtattggcatgtaaaaaataagcgagctctgctcgacgcattggccattgagatgctggataggcacgcgactcactattgccctttagaaggggaaagctggcaagattttttacgtaataacgctaaaagtatgagatgtgctttactaagtcatcgcgatggagcaaaagtatgtttaggtacaggctttacagaaaagcaatatgaaagtgccgaaaatagtctggcctttttatgccaacaaggtttttcactagagcacgcactgtatgcaatgcaggctgttggtatttatactttaggttgcgtattgttggatcaagagcttcaagtcgctaaagaagaaagggaaacacctactactgatagtatgccgccattagtccgacaagctctggaattaaaggatcaccaaggtgcagagccagccttcttattcggccttgaattgatcatatgcggatttgaaaaacaacttaaatgtgaaagtgggtcttaa

SEQ ID NO: 749 - DNA, 627 bp, Artificial sequence
  SuR L7-3B02 CDS
  misc_feature (328)..(328): n is a, c, g, or t
  misc_feature (511)..(511): n is a, c, g, or t
atgggatctagattagataaaagtaaagtgattaacagcgcattagagctgcttaatgaggtcggaatcgaaggtttaacaacccgtaaactcgcccagaagctaggtgtagagcagcctacattgtattggcatgtaaaaaataagcgagctctgctcgacgcaatggccattgagatgctggataggcacgcgactcactattgccctttagaaggggaaagctggcaagattttttacgtaataacgctaaaagtatgagatgtgctttactaagtcatcgcgatggagcaaaagtatgtttaggtacaggctttacagaacagntgtatgaaactgccgaaaatagtatggcctttttatgccaacaaggtttttcactagagaacgcactgtatgcaatgcaggctgctggtatttatactttaggttgcgtattgttggatcaagagcttcaagtcgctaaagaagaaagggaaacacctactactgatagtatgccgccattantccgacaagctctggaattaaaggatcaccaaggtgcagagccagccttcttattcggccttgaattgatcatatgcggattagaaaaacaacttaaatgtgaaagtgggtcttaa

SEQ ID NO: 750 - DNA, 627 bp, Artificial sequence
  SuR L7-3D02 CDS
atgggatctagattagataaaagtaaagtgattaacagcgcattagagctgcttaatgaggtcggaatcgaaggtttaacaacccgtaaactcgcccagaagctaggtgtagagcagcctacattgtattggcatgtaaaaaataagcgagctctgctcgacgcaatggccattgagatgctggataggcacgcgactcactattgccctttagaaggggaaagctggcaagattttttacgtaataacgctaaaagtatgagatgtgctttactaagtcatcgcgatggagcaaaagtatgtttaggtacaggctttacagaacagcaatatgaaactgccgaaaatagtatggcctttttatgccaacaaggtttttcactagagaacgcaatgtatgcaatgcaggctgctggtatttttactttaggttgcgtattgttggatcaagagcttcgagtcgctaaagaagaaagggaaacacctactactgatagtatgccgccattactccgacaagttctggaattaaaggatcaccaaggtgcagagccagccttcttattcggccttgaattgatcatatgcggattagaaaaacaacttaaatgtgaaagtgggtcttaa

SEQ ID NO: 751 - DNA, 627 bp, Artificial sequence
  SuR L7-3G02 CDS
atgggatctagattagataaaagtaaagtgattaacagcgcattagagctgcttaatgaggtcggaatcgaaggtttaacaacccgtaaactcgcccagaagctaggtgtagagcagcctacattgtattggcatgtaaaaaataagcgagctctgctcgacgcaatggccattgagatgctggataggcacgcgactcactattgccctttagaaggggaaagctggcaagattttttacgtaataacgctaaaagtatgagatgtgctttactaagtcatcgcgatggagcaaaagtatgtttaggtacaggctttacagaacagcaatatgaaactgccgaaaatagtctggcctttttatgccaacaaggtttttcactagagaacgcaatgtatgcaatgcaggctgttggtatttttactttaggttgcgtattgttggatcaagagcttcaagtcgctaaagaagaaagggaaacacctactactgatagtatgccgccattactccgacaagttctggaattaaaggatcaccaaggtgcagagccagccttcttattcggccttgaattgatcatatgcggattagaaaaacaacttaaatgtgaaagtgggtcttaa

SEQ ID NO: 752 - DNA, 627 bp, Artificial sequence
  SuR L7-3H02 CDS
atgggatctagattagataaaagtaaagtgattaacagcgcattagagctgcttaatgaggtcggaatcgaaggtttaacaacccgtaaactcgcccagaagctaggtgtagagcagcctacattgtattggcatgtaaaaaataagcgagctctgctcgacgcaatggccattgagatgctggataggcacgcgactcactattgccctttagaaggggaaagctggcaagattttttacgtaataacgctaaaagtatgagatgtgctttactaagtcatcgcgatggagcaaaagtatgtttaggtacaggctttacagaacagcaatatgaaggtgccgaaaatagtatggcctttttatgccaacaaggtttttcactagagaacgcactgtatgcaatgcaggctgttggtatttatactttaggttgcgtattgttggatcaagagcttcaagtcgctaaagaagaaagggaaacacctactactgatagtatgccgtcattagtccgacaagttctggaattaaaggatcaccaaggtgcagagccagccttcttattcggccttgaattgatcatatgcggattagaaaaacaacttaaatgtgaaagtgggtcttaa

SEQ ID NO: 753 - DNA, 627 bp, Artificial sequence
  SuR L7-3B03 CDS
  misc_feature (166)..(166): n is a, c, g, or t
  misc_feature (337)..(337): n is a, c, g, or t
atgggatctagattagataaaagtaaagtgattaacagcgcattagagctgcttaatgaggtcggaatcgaaggtttaacaacccgtaaactcgcccagaagctaggtgtagagcagcctacattgtattggcatgtaaaaaataagcgagctctgctcgacgcantggccattgagatgctggataggcacgcgactcactattgccctttagaaggggaaagctggcaagattttttacgtaataacgctaaaagtatgagatgtgctttactaagtcatcgcgatggagcaaaagtatgtttaggtacaggctttacagaacagcaatatgaanctgccgaaaatagtctggcctttttatgccaacaaggtttttcactagagcacgcactgtatgcaatgcaggctgctggtatttatactttaggttgcgtattgttggatcaagagcttcaagtcgctaaagaagaaagggaaacacctactactgatagtatgccgccattactccgacaagctctggaattaaaggatcaccaaggtgcagagccagccttcttattcggccttgaattgatcatatgcggattagaaaaacaacttaaatgtgaaagtgggtcttaa

SEQ ID NO: 754 - DNA, 627 bp, Artificial sequence
  SuR L7-3C03 CDS
atgggatctagattagataaaagtaaagtgattaacagcgcattagagctgcttaatgaggtcggaatcgaaggtttaacaacccgtaaactcgcccagaagctaggtgtagagcagcctacattgtattggcatgtaaaaaataagcgagctctgctcgacgcattggccattgagatgctggataggcacgcgactcactattgccctttagaaggggaaagctggcaagattttttacgtaataacgctaaaagtatgagatgtgctttactaagtcatcgcgatggagcaaaagtatgtttaggtacaggctttacagaacagatgtatgaaactgccgaaaatagtatggcctttttatgccaacaaggtttttcactagagaacgcaatgtatgcaatgcaggctgctggtatttatactttaggttgcgtattgttggatcaagagcttcaagtcgctaaagaagaaagggaaacacctactactgatagtatgccgccattagtccgacaaggtctggaattaaaggatcaccaaggtgcagagccagccttcttattcggccttgaattgatcatatgcggattagaaaaacaacttaaatgtgaaagtgggtcttaa

SEQ ID NO: 755 - DNA, 627 bp, Artificial sequence; identical to SEQ ID NO: 652
  SuR L7-3E03 CDS

SEQ ID NO: 756 - DNA, 627 bp, Artificial sequence
  SuR L7-3G03 CDS
atgggatctagattagataaaagtaaagtgattaacagcgcattagagctgcttaatgaggtcggaatcgaaggtttaacaacccgtaaactcgcccagaagctaggtgtagagcagcctacattgtattggcatgtaaaaaataagcgagctctgctcgacgcattggccattgagatgctggataggcacgcgactcactattgccctttagaaggggaaagctggcaagattttttacgtaataacgctaaaagtatgagatgtgctttactaagtcatcgcgatggagcaaaagtatgtttaggtacaggctttacagaaaagcaatatgaaactgccgaaaatagtatggcctttttatgccaacaaggtttttcactagagcacgcaatgtatgcaatgcaggccgctggtatttatactttaggttgcgtattgttggatcaagagcttcaagtcgctaaagaagaaagggaaacacctactactgatagtatgccgccattagtccgacaagctctggaattaaaggatcaccaaggtgcagagccagccttcttattcggccttgaattgatcatatgcggattagaaaaacaacttaaatgtgaaagtgggtcttaa

SEQ ID NO: 757 - DNA, 627 bp, Artificial sequence
  SuR L7-3H03 CDS
atgggatctagattagataaaagtaaagtgattaacagcgcattagagctgcttaatgaggtcggaatcgaaggtttaacaacccgtaaactcgcccagaagctaggtgtagagcagcctacattgtattggcatgtaaaaaataagcgagctctgctcgacgcaatggccattgagatgctggataggcacgcgactcacttgtgccctttagaaggggaaagctggcaagattttttacgtaataacgctaaaagtatgagatgtgctttactaagtcatcgcgatggagcaaaagtatgtttaggtacaggctttacagaacagatgtatgaaactgccgaaaatagtctggcctttttatgccaacaaggtttttcactagagaacgcactgtatgcaatgcaggctgctggtatttatactttaggttgcgtattgttggatcaagagcttcaagtcgctaaagaagaaagggaaacacctactactgatagtatgccgccattagtccgacaagttctggaattaaaggatcaccaaggtgcagagccagccttcttattcggccttgaattgatcatatgcggattagaaaaacaacttaaatgtgaaagtgggtcttaa

SEQ ID NO: 758 - DNA, 627 bp, Artificial sequence
  SuR L7-3B04 CDS
  misc_feature (325)..(325): n is a, c, g, or t
atgggatctagattagataaaagtaaagtgattaacagcgcattagagctgcttaatgaggtcggaatcgaaggtttaacaacccgtaaactcgcccagaagctaggtgtagagcagcctacattgtattggcatgtaaaaaataagcgagctctgctcgacgcattggccattgagatgctggataggcacgcgactcactattgccctttagaaggggaaagctggcaagattttttacgtaataacgctaaaagtatgagatgtgctttactaagtcatcgcgatggagcaaaagtatgtttaggtacaggctttacagaanagcaatatgaagctgccgaaaatagtctggcctttttatgccaacaaggtttttcactagagcacgcactgtatgcaatgcaggctgttggtatttatactttaggttgcgtattgttggatcaagagcttcaagtcgctaaagaagaaagggaaacacctactactgatagtatgccgccattagtccgacaagctctggaattaaaggatcaccaaggtgcagagccagccttcttattcggccttgaattgatcatatgcggattagaaaaacaacttaaatgtgaaagtgggtcttaa

SEQ ID NO: 759 - DNA, 627 bp, Artificial sequence
  SuR L7-3E04 CDS
atgggatctagattagataaaagtaaagtgattaacagcgcattagagctgcttaatgaggtcggaatcgaaggtttaacaacccgtaaactcgcccagaagctaggtgtagagcagcctacattgtattggcatgtaaaaaataagcgagctctgctcgacgcaatggccattgagatgctggataggcacgcgactcactattgccctttagaaggggaaagctggcaagattttttacgtaataacgctaaaagtatgagatgtgctttactaagtcatcgcgatggagcaaaagtatgtttaggtacaggctttacagaacagcaatatgaaagtgccgaaaatagtctggcctttttatgccaacaaggtttttcactagagcacgcaatgtatgcaatgcaggctgctggtatttttactttaggttgcgtattgttggatcaagagcttcaagtcgctaaagaagaaagggaaacacctactactgatagtatgccgccattagtccgacaagctctggaattaaaggatcaccaaggtgcagagccagccttcttattcggccttgaattgatcatatgcggattagaaaaacaacttaaatgtgaaagtgggtcttaa

SEQ ID NO: 760 - DNA, 627 bp, Artificial sequence
  SuR L7-3G04 CDS
atgggatctagattagataaaagtaaagtgattaacagcgcattagagctgcttaatgaggtcggaatcgaaggtttaacaacccgtaaactcgcccagaagctaggtgtagagcagcctacattgtattggcatgtaaaaaataagcgagctctgctcgacgcattggccattgagatgctggataggcacgcgacacactattgccctttagaaggggaaagctggcaagattttttacgtaataacgctaaaagtatgagatgtgctttactaagtcatcgcgatggagcaaaagtatgtttaggaacaggctttacagaacagatgtatgaaactgccgaaaatagtctggcctttttatgccaacaaggtttttcactagagcacgcaatgtatgcaatgcaggctgctggtatttttactttaggttgcgtattgttggatcaagagcttcaagtcgctaaagaagaaagggaaacacctactactgatagtatgccgccattagtccgacaagttctggaattaaaggatcaccaaggtgcagagccagccttcttattcggccttgaattgatcatatgcggattagaaaaacaacttaaatgtgaaagtgggtcttaa

SEQ ID NO: 761 - DNA, 627 bp, Artificial sequence
  SuR L7-3A05 CDS
atgggatctagattagataaaagtaaagtgattaacagcgcattagagctgcttaatgaggtcggaatcgaaggtttaacaacccgtaaactcgcccagaagctaggtgtagagcagcctacattgtattggcatgtaaaaaataagcgagctctgctcgacgcattggccattgagatgctggataggcacgcgactcactattgccctttagaaggggaaagctggcaagattttttacgtaataacgctaaaagtatgagatgtgctttactaagtcatcgcgatggagcaaaagtatgtttaggtacaggctttacagaacagatgtatgaagctgccgaaaatagtctggcctttttatgccaacaaggtttttcactagagcacgcaatgtatgcaatgcaggctgttggtatttatactttaggttgcgtattgttggatcaagagcttcaagtcgctaaagaagaaagggaaacacctactactgatagtatgccgccattagtccgacaaggtctggaattaaaggatcaccaaggtgcagagccagccttcttattcggccttgaattgatcatatgcggattagaaaaacaacttaaatgtgaaagtgggtcttaa

SEQ ID NO: 762 - DNA, 627 bp, Artificial sequence
  SuR L7-3B05 CDS
  misc_feature (166)..(166): n is a, c, g, or t
  misc_feature (203)..(204): n is a, c, g, or t
  misc_feature (329)..(330): n is a, c, g, or t
  misc_feature (388)..(388): n is a, c, g, or t
  misc_feature (415)..(415): n is a, c, g, or t
  misc_feature (422)..(422): n is a, c, g, or t
atgggatctagattagataaaagtaaagtgattaacagcgcattagagctgcttaatgaggtcggaatcgaaggtttaacaacccgtaaactcgcccagaagctaggtgtagagcagcctacattgtattggcatgtaaaaaataagcgagctctgctcgacgcantggccattgagatgctggataggcacgcgactcactnntgccctttagaaggggaaagctggcaagattttttacgtaataacgctaaaagtatgagatgtgctttactaagtcatcgcgatggagcaaaagtatgtttaggtacaggctttacagaacagcnntatgaaactgccgaaaatagtctggcctttttatgccaacaaggtttttcactagagnacgcaatgtatgcaatgcaggctgctngtatttntactttaggttgcgtattgttggatcaagagcttcaagtcgctaaagaagaaagggaaacacctactactgatagtatgccgccattagtccgacaagctctggaattaaaggatcaccaaggtgcagagccagccttcttattcggccttgaattgatcatatgcggattagaaaaacaacttaaatgtgaaagtgggtcttaa

SEQ ID NO: 763 - DNA, 627 bp, Artificial sequence
  SuR L7-3H05 CDS
  misc_feature (511)..(511): n is a, c, g, or t
atgggatctagattagataaaagtaaagtgattaacagcgcattagagctgcttaatgaggtcggaatcgaaggtttaacaacccgtaaactcgcccagaagctaggtgtagagcagcctacattgtattggcatgtaaaaaataagcgagctctgctcgacgcaatggccattgagatgctggataggcacgcgactcactattgccctttagaaggggaaagctggcaagattttttacgtaataacgctaaaagtatgagatgtgctttactaagtcatcgcgatggagcaaaagtatgtttaggtacaggctttacagaacagcaatatgaaagtgccgaaaatagtctggcctttttatgccaacaaggtttttcactagagaacgcaatgtatgcaatgcaggctgctggtatttatactttaggttgcgtattgttggatcaagagcttcaagtcgctaaagaagaaagggaaacacctactactgatagtatgccgccattantccgacaagctctggaattaaaggatcaccaaggtgcagagccagccttcttattcggccttgaattgatcatatgcggattagaaaaacaacttaaatgtgaaagtgggtcttaa

SEQ ID NO: 764 - DNA, 627 bp, Artificial sequence
  SuR L7-3B06 CDS
atgggatctagattagataaaagtaaagtgattaacagcgcattagagctgcttaatgaggtcggaatcgaaggtttaacaacccgtaaactcgcccagaagctaggtgtagagcagcctacattgtattggcatgtaaaaaataagcgagctctgctcgacgcaatggccattgagatgctggataggcacgcgactcacatctgccctttagaaggggaaagctggcaagattttttacgtaataacgctaaaagtatgagatgtgctttactaagtcatcgcgatggagcaaaagtatgtttaggtacaggctttacagaacagcaatatgaaactgccgaaaatagtctggcctttttatgccaacaaggtttttcactagagcacgcaatgtatgcaatgcaggctgctggtatttatactttaggttgcgtattgttggatcaagagcttcaagtcgctaaagaagaaagggaaacacctactactgatagtatgccgccattagtccgacaagttctggaattaaaggatcaccaaggtgcagagccagccttcttattcggccttgaattgatcatatgcggattagaaaaacaacttaaatgtgaaagtgggtcttaa

SEQ ID NO: 765 - DNA, 627 bp, Artificial sequence
  SuR L7-3D06 CDS
  misc_feature (388)..(388): n is a, c, g, or t
atgggatctagattagataaaagtaaagtgattaacagcgcattagagctgcttaatgaggtcggaatcgaaggtttaacaacccgtaaactcgcccagaagctaggtgtagagcagcctacattgtattggcatgtaaaaaataagcgagctctgctcgacgcaatggccattgagatgctggataggcacgcgactcacatgtgccctttagaaggggaaagctggcaagattttttacgtaataacgctaaaagtatgagatgtgctttactaagtcatcgcgatggagcaaaagtatgtttaggtacaggctttacagaacagcaatatgaaagtgccgaaaatagtatggcctttttatgccaacaaggtttttcactagagnacgcaatgtatgcaatgcaggctgttggtatttttactttaggttgcgtattgttggatcaagagcttcaagtcgctaaagaagaaagggaaacacctactactgatagtatgccgccattagtccgacaaggtctggaattaaaggatcaccaaggtgcagagccagccttcttattcggccttgaattgatcatatgcggattagaaaaacaacttaaatgtgaaagtgggtcttaa

SEQ ID NO: 766 - DNA, 627 bp, Artificial sequence
  SuR L7-3E06 CDS
atgggatctagattagataaaagtaaagtgattaacagcgcattagagctgcttaatgaggtcggaatcgaaggtttaacaacccgtaaactcgcccagaagctaggtgtagagcagcctacattgtattggcatgtaaaaaataagcgagctctgctcgacgcattggccattgagatgctggataggcacgcgactcactattgccctttagaaggggaaagctggcaagattttttacgtaataacgctaaaagtatgagatgtgctttactaagtcatcgcgatggagcaaaagtatgtttaggtacaggctttacagaaaagcaatatgaaagtgccgaaaatagtatggcctttttatgccaacaaggtttttcactagagcacgcactgtatgcaatgcaggctgttggtatttatactttaggttgcgtattgttggatcaagagcttcaagtcgctaaagaagaaagggaaacacctactactgatagtatgccgccattagtccgacaaggtctggaattaaaggatcaccaaggtgcagagccagccttcttattcggccttgaattgatcatatgcggattagaaaaacaacttaaatgtgaaagtgggtcttaa

SEQ ID NO: 767 - DNA, 627 bp, Artificial sequence
  SuR L7-3A07 CDS
atgggatctagattagataaaagtaaagtgattaacagcgcattagagctgcttaatgaggtcggaatcgaaggtttaacaacccgtaaactcgcccagaagctaggtgtagagcagcctacattgtattggcatgtaaaaaataagcgagctctgctcgacgcaatggccattgagatgctggataggcacgcgactcactattgccctttagaaggggaaagctggcaagattttttacgtaataacgctaaaagtatgagatgtgctttactaagtcatcgcgatggagcaaaagtatgtttaggtacaggctttacagaacagcaatatgaaggtgccgaaaatagtctggcctttttatgccaacaaggtttttcactagagcacgcaatgtatgcaatgcaggctgttggtatttttactttaggttgcgtattgttggatcaagagcttcaagtcgctaaagaagaaagggaaacacctactactgatagtatgccgccattagtccgacaaggtctggaattaaaggatcaccaaggtgcagagccagccttcttattcggccttgaattgatcatatgcggattagaaaaacaacttaaatgtgaaagtgggtcttaa

SEQ ID NO: 768 - DNA, 627 bp, Artificial sequence
  SuR L7-3C07 CDS
atgggatctagattagataaaagtaaagtgattaacagcgcattagagctgcttaatgaggtcggaatcgaaggtttaacaacccgtaaactcgcccagaagctaggtgtagagcagcctacattgtattggcatgtaaaaaataagcgagctctgctcgacgcaatggccattgagatgctggataggcacgcgactcactattgccctttagaaggggaaagctggcaagattttttacgtaataacgctaaaagtatgagatgtgctttactaagtcatcgcgatggagcaaaagtatgtttaggtacaggctttacagaacagcaatatgaaagtgccgaaaatagtctggcctttttatgccaacaaggtttttcactagagaacgcaatgtatgcaatgcaggctgttggtatttttactttaggttgcgtattgttggatcaagagcttcaagtcgctaaagaagaaagggaaacacctactactgatagtatgccgccattactccgacaagttctggaattaaaggatcaccaaggtgcagagccagccttcttattcggccttgaattgatcatatgcggattagaaaaacaacttaaatgtgaaagtgggtcttaa

SEQ ID NO: 769 - DNA, 627 bp, Artificial sequence
  SuR L7-3F07 CDS
atgggatctagattagataaaagtaaagtgattaacagcgcattagagctgcttaatgaggtcggaatcgaaggtttaacaacccgtaaactcgcccagaagctaggtgtagagcagcctacattgtattggcatgtaaaaaataagcgagctctgctcgacgcaatggccattgagatgctggataggcacgcgactcacatctgccctttagaaggggaaagctggcaagattttttacgtaataacgctaaaagtatgagatgtgctttactaagtcatcgcgatggagcaaaagtatgtttaggtacaggctttacagaacagcaatatgaaactgccgaaaatagtctggcctttttatgccaacaaggtttttcactagagaacgcaatgtatgcaatgcaggctgttggtatttatactttaggttgcgtattgttggatcaagagcttcaagtcgctaaagaagaaagggaaacacctactactgatagtatgccgccattagtccgacaagctctggaattaaaggatcaccaaggtgcagagccagccttcttattcggccttgaattgatcatatgcggattagaaaaacaacttaaatgtgaaagtgggtcttaa

SEQ ID NO: 770 - DNA, 627 bp, Artificial sequence
  SuR L7-3A08 CDS
atgggatctagattagataaaagtaaagtgattaacagcgcattagagctgcttaatgaggtcggaatcgaaggtttaacaacccgtaaactcgcccagaagctaggtgtagagcagcctacattgtattggcatgtaaaaaataagcgagctctgctcgacgcaatggccattgagatgctggataggcacgcgactcactattgccctttagaaggggaaagctggcaagattttttacgtaataacgctaaaagtatgagatgtgctttactaagtcaacgcgatggagcaaaagtatgtttaggtacaggctttacagaacagcaatatgaagctgccgaaaatagtctggcctttttatgccaacaaggtttttcactagagaacgcaatgtatgcaatgcaggctgttggtatttttactttaggttgcgtattgttggatcaagagcttcaagtcgctaaagaagaaagggaaacacctactactgatagtatgccgccattagtccgacaagctctggaattaaaggatcaccaaggtgcagagccagccttcttattcggccttgaattgatcatatgcggattagaaaaacaacttaaatgtgaaagtgggtcttaa

SEQ ID NO: 771 - DNA, 627 bp, Artificial sequence
  SuR L7-3B08 CDS
atgggatctagattagataaaagtaaagtgattaacagcgcattagagctgcttaatgaggtcggaatcgaaggtttaacaacccgtaaactcgcccagaagctaggtgtagagcagcctacattgtattggcatgtaaaaaataagcgagctctgctcgacgcaatggccattgagatgctggataggcacgcgactcactattgccctttagaaggggaaagctggcaagattttttacgtaataacgctaaaagtatgagatgtgctttactaagtcatcgcgatggagcaaaagtatgtttaggtacaggctttacagaacagcaatatgaaggggccgaaaatagtatggcctttttatgccaacaaggtttttcactagagaacgcactgtatgcaatgcaggctgttggtatttatactttaggttgcgtattgttggatcaagagcttcaagtcgctaaagaagaaagggaaacacctactactgatagtatgccgccattagtccgacaagttctggaattaaaggatcaccaaggtgcagagccagccttcttattcggccttgaattgatcatatgcggattagaaaaacaacttaaatgtgaaagtgggtcttaa

SEQ ID NO: 772 - DNA, 627 bp, Artificial sequence
  SuR L7-3C08 CDS
atgggatctagattagataaaagtaaagtgattaacagcgcattagagctgcttaatgaggtcggaatcgaaggtttaacaacccgtaaactcgcccagaagctaggtgtagagcagcctacattgtattggcatgtaaaaaataagcgagctctgctcgacgcaatggccattgagatgctggataggcacgcgactcactattgccctttagaaggggaaagctggcaagattttttacgtaataacgctaaaagtatgagatgtgctttactaagtcatcgcgatggagcaaaagtatgtttaggtacaggctttacagaacagcaatatgaaggtgccgaaaatagtatggcctttttatgccaacaaggtttttcactagagaacgcaatgtatgcaatgcaggctgctggtatttatactttaggttgcgtattgttggatcaagagcttcaagtcgctaaagaagaaagggaaacacctactactgatagtatgccgccattagtccgacaagctctggaattaaaggatcaccaaggtgcagagccagccttcttattcggccttgaattgatcatatgcggattagaaaaacaacttaaatgtgaaagtgggtcttaa

SEQ ID NO: 773 - DNA, 627 bp, Artificial sequence
  SuR L7-3F08 CDS
  misc_feature (166)..(166): n is a, c, g, or t
  misc_feature (328)..(330): n is a, c, g, or t
  misc_feature (394)..(394): n is a, c, g, or t
  misc_feature (413)..(413): n is a, c, g, or t
atgggatctagattagataaaagtaaagtgattaacagcgcattagagctgcttaatgaggtcggaatcgaaggtttaacaacccgtaaactcgcccagaagctaggtgtagagcagcctacattgtattggcatgtaaaaaataagcgagctctgctcgacgcantggccattgagatgctggataggcacgcgactcactattgccctttagaaggggaaagctggcaagattttttacgtaataacgctaaaagtatgagatgtgctttactaagtcatcgcgatggagcaaaagtatgtttaggtacaggctttacagaacagnnntatgaagctgccgaaaatagtatggcctttttatgccaacaaggtttttcactagagcacgcantgtatgcaatgcaggctgntggtatttatactttaggttgcgtattgttggatcaagagcttcaagtcgctaaagaagaaagggaaacacctactactgatagtatgccgccattagtccgacaagttctggaattaaaggatcaccaaggtgcagagccagccttcttattcggccttgaattgatcatatgcggattagaaaaacaacttaaatgtgaaagtgggtcttaa

SEQ ID NO: 774 - DNA, 627 bp, Artificial sequence
  SuR L7-3G08 CDS
  misc_feature (157)..(157): n is a, c, g, or t
  misc_feature (159)..(159): n is a, c, g, or t
  misc_feature (165)..(166): n is a, c, g, or t
  misc_feature (187)..(187): n is a, c, g, or t
  misc_feature (189)..(189): n is a, c, g, or t
  misc_feature (195)..(195): n is a, c, g, or t
  misc_feature (238)..(238): n is a, c, g, or t
  misc_feature (240)..(240): n is a, c, g, or t
  misc_feature (257)..(257): n is a, c, g, or t
  misc_feature (267)..(267): n is a, c, g, or t
  misc_feature (291)..(291): n is a, c, g, or t
  misc_feature (297)..(297): n is a, c, g, or t
  misc_feature (304)..(304): n is a, c, g, or t
  misc_feature (318)..(318): n is a, c, g, or t
  misc_feature (328)..(329): n is a, c, g, or t
  misc_feature (363)..(363): n is a, c, g, or t
  misc_feature (388)..(388): n is a, c, g, or t
  misc_feature (394)..(394): n is a, c, g, or t
  misc_feature (414)..(414): n is a, c, g, or t
  misc_feature (420)..(420): n is a, c, g, or t
  misc_feature (423)..(423): n is a, c, g, or t
  misc_feature (442)..(442): n is a, c, g, or t
  misc_feature (456)..(456): n is a, c, g, or t
  misc_feature (504)..(504): n is a, c, g, or t
  misc_feature (511)..(511): n is a, c, g, or t
  misc_feature (521)..(521): n is a, c, g, or t
  misc_feature (546)..(546): n is a, c, g, or t
  misc_feature (573)..(573): n is a, c, g, or t
  misc_feature (594)..(594): n is a, c, g, or t
atgggatctagattagataaaagtaaagtgattaacagcgcattagagctgcttaatgaggtcggaatcgaaggtttaacaacccgtaaactcgcccagaagctaggtgtagagcagcctacattgtattggcatgtaaaaaataagcgagctctgntngacgcnntggccattgagatgctggatngncacgcnactcactattgccctttagaaggggaaagctggcaagattttntncgtaataacgctaaaantatgagatgngctttactaagtcatcgcgatggngcaaangtatgtntaggtacaggcttnacagaacagnngtatgaaactgccgaaaatagtctggcctttttntgccaacaaggtttttcactagagnacgcantgtatgcaatgcaggctgtnggtatntanactttaggttgcgtattgntggatcaagagctncaagtcgctaaagaagaaagggaaacacctactactgatagtatgccnccattantccgacaagntctggaattaaaggatcaccaaggngcagagccagccttcttattcggcctngaattgatcatatgcggattngaaaaacaacttaaatgtgaaagtgggtcttaa

SEQ ID NO: 775 - DNA, 627 bp, Artificial sequence; identical to SEQ ID NO: 761
  SuR L7-3B09 CDS

SEQ ID NO: 776 - DNA, 627 bp, Artificial sequence
  SuR L7-3F09 CDS
atgggatctagattagataaaagtaaagtgattaacagcgcattagagctgcttaatgaggtcggaatcgaaggtttaacaacccgtaaactcgcccagaagctaggtgtagagcagcctacattgtattggcatgtaaaaaataagcgagctctgctcgacgcaatggccattgagatgctggataggcacgcgactcactattgccctttagaaggggaaagctggcaagattttttacgtaataacgctaaaagtatgagatgtgctttactaagtcatcgcgatggagcaaaagtatgtttaggtacaggctttacagaacagcaatatgaagctgccgaaaatagtatggcctttttatgccaacaaggtttttcactagagcacgcactgtatgcaatgcaggctgcttgtatttatactttaggttgcgtattgttggatcaagagcttcaagtcgctaaagaagaaagggaaacacctactactgatagtatgccgccattagtccgacaagctctggaattaaaggatcaccaaggtgcagagccagccttcttattcggccttgaattgatcatatgcggattagaaaaacaacttaaatgtgaaagtgggtcttaa

SEQ ID NO: 777 - DNA, 627 bp, Artificial sequence; identical to SEQ ID NO: 726
  SuR L7-3A10 CDS

SEQ ID NO: 778 - DNA, 627 bp, Artificial sequence
  SuR L7-3B10 CDS
atgggatctagattagataaaagtaaagtgattaacagcgcattagagctgcttaatgaggtcggaatcgaaggtttaacaacccgtaaactcgcccagaagctaggtgtagagcagcctacattgtattggcatgtaaaaaataagcgagctctgctcgacgcaatggccattgagatgctggataggcacgcgactcactattgccctttagaaggggaaagctggcaagattttttacgtaataacgctaaaagtatgagatgtgctttactaagtcatcgcgatggagcaaaagtatgtttaggtacaggctttacagaacagcactatgaaagtgccgaaaatagtctggcctttttatgccaacaaggtttttcactagagcacgcaatgtatgcaatgcaggctgttggtatttatactttaggttgcgtattgttggatcaagagcttcaagtcgctaaagaagaaagggaaacacctactactgatagtatgccgccattagtccgacaagctctggaattaaaggatcaccaaggtgcagagccagccttcttattcggccttgaattgatcatatgcggattagaaaaacaacttaaatgtgaaagtgggtcttaa

SEQ ID NO: 779 - DNA, 627 bp, Artificial sequence
  SuR L7-3C10 CDS
  misc_feature (413)..(413): n is a, c, g, or t
atgggatctagattagataaaagtaaagtgattaacagcgcattagagctgcttaatgaggtcggaatcgaaggtttaacaacccgtaaactcgcccagaagctaggtgtagagcagcctacattgtattggcatgtaaaaaataagcgagctctgctcgacgcaatggccattgagatgctggataggcacgcgactcactattgccctttagaaggggaaagctggcaagattttttacgtaataacgctaaaagtatgagatgtgctttactaagtcatcgcgatggagcaaaagtatgtttaggtacaggctttacagaacagcaatatgaagctgccgaaaatagtatggcctttttatgccaacaaggtttttcactagagcacgcaatgtatgcaatgcaggctgntggtatttatactttaggttgcgtattgttggatcaagagcttcaagtcgctaaagaagaaagggaaacacctactactgatagtatgccgccattagtccgacaagctctggaattaaaggatcaccaaggtgcagagccagccttcttattcggccttgaattgatcatatgcggattagaaaaacaacttaaatgtgaaagtgggtcttaa

SEQ ID NO: 780 - DNA, 627 bp, Artificial sequence
  SuR L7-3G10 CDS
atgggatctagattagataaaagtaaagtgattaacagcgcattagagctgcttaatgaggtcggaatcgaaggtttaacaacccgtaaactcgcccagaagctaggtgtagagcagcctacattgtattggcatgtaaaaaataagcgagctctgctcgacgcaatggccattgagatgctggataggcacgcgactcactattgccctttagaaggggaaagctggcaagattttttacgtaataacgctaaaagtatgagatgtgctttactaagtcatcgcgatggagcaaaagtatgtttaggtacaggctttacagaacagcaatatgaaactgccgaaaatagtatggcctttttatgccaacaaggtttttcactagagcacgcaatgtatgcaatgcaggctgctggtatttatactttaggttgcgtattgttggatcaagagcttcaagtcgctaaagaagaaagggaaacacctactactgatagtatgccgccattactccgacaagctctggaattaaaggatcaccaaggtgcagagccagccttcttattcggccttgaattgatcatatgcggattagaaaaacaacttaaatgtgaaagtgggtcttaa

SEQ ID NO: 781 - DNA, 627 bp, Artificial sequence
  SuR L7-3A11 CDS
atgggatctagattagataaaagtaaagtgattaacagcgcattagagctgcttaatgaggtcggaatcgaaggtttaacaacccgtaaactcgcccagaagctaggtgtagagcagcctacattgtattggcatgtaaaaaataagcgagctctgctcgacgcaatggccattgagatgctggataggcacgcgactcacttctgccctttagaaggggaaagctggcaagattttttacgtaataacgctaaaagtatgagatgtgctttactaagtcatcgcgatggagcaaaagtatgtttaggtacaggctttacagaacagcaatatgaaactgccgaaaatagtctggcctttttatgccaacaaggtttttcactagagaacgcactgtatgcaatgcaggctgcttgtatttatactttaggttgcgtattgttggatcaagagcttcaagtcgctaaagaagaaagggaaacacctactactgatagtatgccgccattagtccgacaagctctggaattaaaggatcaccaaggtgcagagccagccttcttattcggccttgaattgatcatatgcggattagaaaaacaacttaaatgtgaaagtgggtcttaa

SEQ ID NO: 782 - DNA, 627 bp, Artificial sequence
  SuR L7-3C11 CDS
atgggatctagattagataaaagtaaagtgattaacagcgcattagagctgcttaatgaggtcggaatcgaaggtttaacaacccgtaaactcgcccagaagctaggtgtagagcagcctacattgtattggcatgtaaaaaataagcgagctctgctcgacgcaatggccattgagatgctggataggcacgcgactcactattgccctttagaaggggaaagctggcaagattttttacgtaataacgctaaaagtatgagatgtgctttactaagtcatcgcgatggagcaaaagtatgtttaggtacaggctttacagaacagcaatatgaaagtgccgaaaatagtatggcctttttatgccaacaaggtttttcactagagaacgcaatgtatgcaatgcaggctgctggtatttatactttaggttgcgtattgttggatcaagagcttcaagtcgctaaagaagaaagggaaacacctactactgatagtatgccgccattagtccgacaaggtctggaattaaaggatcaccaaggtgcagagccagccttcttattcggccttgaattgatcatatgcggattagaaaaacaacttaaatgtgaaagtgggtcttaa

SEQ ID NO: 783 - DNA, 627 bp, Artificial sequence
  SuR L7-3E11 CDS
atgggatctagattagataaaagtaaagtgattaacagcgcattagagctgcttaatgaggtcggaatcgaaggtttaacaacccgtaaactcgcccagaagctaggtgtagagcagcctacattgtattggcatgtaaaaaataagcgagctctgctcgacgcaatggccattgagatgctggataggcacgcgactcacatgtgccctttagaaggggaaagctggcaagattttttacgtaataacgctaaaagtatgagatgtgctttactaagtcatcgcgatggagcaaaagtatgtttaggtacaggctttacagaacagcaatatgaaagtgccgaaaatagtatggcctttttatgccaacaaggtttttcactagagcacgcaatgtatgcaatgcaggctgctggtatttatactttaggttgcgtattgttggatcaagagcttcaagtcgctaaagaagaaagggaaacacctactactgatagtatgccgccattactccgacaagctctggaattaaaggatcaccaaggtgcagagccagccttcttattcggccttgaattgatcatatgcggattagaaaaacaacttaaatgtgaaagtgggtcttaa

SEQ ID NO: 784 - DNA, 627 bp, Artificial sequence
  SuR L7-3G11 CDS
  misc_feature (203)..(203): n is a, c, g, or t
  misc_feature (338)..(338): n is a, c, g, or t
  misc_feature (511)..(511): n is a, c, g, or t
  misc_feature (521)..(521): n is a, c, g, or t
atgggatctagattagataaaagtaaagtgattaacagcgcattagagctgcttaatgaggtcggaatcgaaggtttaacaacccgtaaactcgcccagaagctaggtgtagagcagcctacattgtattggcatgtaaaaaataagcgagctctgctcgacgcaatggccattgagatgctggataggcacgcgactcactnttgccctttagaaggggaaagctggcaagattttttacgtaataacgctaaaagtatgagatgtgctttactaagtcatcgcgatggagcaaaagtatgtttaggtacaggctttacagaacagcaatatgaaantgccgaaaatagtatggcctttttatgccaacaaggtttttcactagagaacgcaatgtatgcaatgcaggctgttggtatttatactttaggttgcgtattgttggatcaagagcttcaagtcgctaaagaagaaagggaaacacctactactgatagtatgccgccattantccgacaagntctggaattaaaggatcaccaaggtgcagagccagccttcttattcggccttgaattgatcatatgcggattagaaaaacaacttaaatgtgaaagtgggtcttaa

SEQ ID NO: 785 - DNA, 627 bp, Artificial sequence
  SuR L7-3A12 CDS
atgggatctagattagataaaagtaaagtgattaacagcgcattagagctgcttaatgaggtcggaatcgaaggtttaacaacccgtaaactcgcccagaagctaggtgtagagcagcctacattgtattggcatgtaaaaaataagcgagctctgctcgacgcattggccattgagatgctggataggcacgcgactcactattgccctttagaaggggaaagctggcaagattttttacgtaataacgctaaaagtatgagatgtgctttactaagtcatcgcgatggagcaaaagtatgtttaggtacaggctttacagaacagcactatgaagctgccgaaaatagtatggcctttttatgccaacaaggtttttcactagagaacgcaatgtatgcaatgcaggctgttggtatttttactttaggttgcgtattgttggatcaagagcttcaagtcgctaaagaagaaagggaaacacctactactgatagtatgccgccattagtccgacaagctctggaattaaaggatcaccaaggtgcagagccagccttcttattcggccttgaattgatcatatgcggattagaaaaacaacttaaatgtgaaagtgggtcttaa

SEQ ID NO: 786 - DNA, 627 bp, Artificial sequence
  SuR L7-3B12 CDS
atgggatctagattagataaaagtaaagtgattaacagcgcattagagctgcttaatgaggtcggaatcgaaggtttaacaacccgtaaactcgcccagaagctaggtgtagagcagcctacattgtattggcatgtaaaaaataagcgagctctgctcgacgcattggccattgagatgctggataggcacgcgactcactattgccctttagaaggggaaagctggcaagattttttacgtaataacgctaaaagtatgagatgtgctttactaagtcatcgcgatggagcaaaagtatgtttaggtacaggctttacagaacagatgtatgaaagtgccgaaaatagtatggcctttttatgccaacaaggtttttcactagagcacgcaatgtatgcaatgcaggctgctggtatttatactttaggttgcgtattgttggatcaagagcttcaagtcgctaaagaagaaagggaaacacctactactgatagtatgccgccattactccgacaagctctggaattaaaggatcaccaaggtgcagagccagccttcttattcggccttgaattgatcatatgcggattagaaaaacaacttaaatgtgaaagtgggtcttaa

SEQ ID NO: 787 - DNA, 627 bp, Artificial sequence
  SuR L7-3C12 CDS
  misc_feature (328)..(330): n is a, c, g, or t
  misc_feature (338)..(338): n is a, c, g, or t
  misc_feature (422)..(422): n is a, c, g, or t
  misc_feature (512)..(513): n is a, c, g, or t
atgggatctagattagataaaagtaaagtgattaacagcgcattagagctgcttaatgaggtcggaatcgaaggtttaacaacccgtaaactcgcccagaagctaggtgtagagcagcctacattgtattggcatgtaaaaaataagcgagctctgctcgacgcaatggccattgagatgctggataggcacgcgactcactattgccctttagaaggggaaagctggcaagattttttacgtaataacgctaaaagtatgagatgtgctttactaagtcatcgcgatggagcaaaagtatgtttaggtacaggctttacagaacagnnntatgaaantgccgaaaatagtctggcctttttatgccaacaaggtttttcactagagcacgcactgtatgcaatgcaggctgcttgtatttntactttaggttgcgtattgttggatcaagagcttcaagtcgctaaagaagaaagggaaacacctactactgatagtatgccgccattagnncgacaaggtctggaattaaaggatcaccaaggtgcagagccagccttcttattcggccttgaattgatcatatgcggattagaaaaacaacttaaatgtgaaagtgggtcttaa

SEQ ID NO: 788 - DNA, 627 bp, Artificial sequence
  SuR L7-3E12 CDS
atgggatctagattagataaaagtaaagtgattaacagcgcattagagctgcttaatgaggtcggaatcgaaggtttaacaacccgtaaactcgcccagaagctaggtgtagagcagcctacattgtattggcatgtaaaaaataagcgagctctgctcgacgcaatggccattgagatgctggataggcacgcgactcactattgccctttagaaggggaaagctggcaagattttttacgtaataacgctaaaagtatgagatgtgctttactaagtcatcgcgatggagcaaaagtatgtttaggtacaggctttacagaacagcaatatgaaagtgccgaaaatagtatggcctttttatgccaacaaggtttttcactagagcacgcaatgtatgcaatgcaggctgttggtatttatactttaggttgcgtattgttggatcaagagcttcaagtcgctaaagaagaaagggaaacacctactactgatagtatgccgccattactccgacaagctctggaattaaaggatcaccaaggtgcagagccagccttcttattcggccttgaattgatcatatgcggattagaaaaacaacttaaatgtgaaagtgggtcttaa

SEQ ID NO: 789 - DNA, 627 bp, Artificial sequence
  SuR L7-3F12 CDS
atgggatctagattagataaaagtaaagtgattaacagcgcattagagctgcttaatgaggtcggaatcgaaggtttaacaacccgtaaactcgcccagaagctaggtgtagagcagcctacattgtattggcatgtaaaaaataagcgagctctgctcgacgcaatggccattgagatgctggataggcacgcgactcacgtctgccctttagaaggggaaagctggcaagattttttacgtaataacgctaaaagtatgagatgtgctttactaagtcatcgcgatggagcaaaagtatgtttaggtacaggctttacagaacagcactatgaaagtgccgaaaatagtctggcctttttatgccaacaaggtttttcactagagcacgcactgtatgcaatgcaggctgttggtatttatactttaggttgcgtattgttggatcaagagcttcaagtcgctaaagaagaaagggaaacacctactactgatagtatgccgccattagtccgacaagctctggaattaaaggatcaccaaggtgcagagccagccttcttattcggccttgaattgatcatatgcggattagaaaaacaacttaaatgtgaaagtgggtcttaa

SEQ ID NO: 790 - DNA, 627 bp, Artificial sequence
  SuR L7-3G12 CDS
atgggatctagattagataaaagtaaagtgattaacagcgcattagagctgcttaatgaggtcggaatcgaaggtttaacaacccgtaaactcgcccagaagctaggtgtagagcagcctacattgtattggcatgtaaaaaataagcgagctctgctcgacgcaatggccattgagatgctggataggcacgcgactcacttctgccctttagaaggggaaagctggcaagattttttacgtaataacgctaaaagtatgagatgtgctttactaagtcatcgcgatggagcaaaagtatgtttaggtacaggctttacagaacagcaatatgaaactgccgaaaatagtctggcctttttatgccaacaaggtttttcactagagaacgcaatgtatgcaatgcaggctgttggtatttatactttaggttgcgtattgttggatcaagagcttcaagtcgctaaagaagaaagggaaacacctactactgatagtatgccgccattagtccgacaaggtctggaattaaaggatcaccaaggtgcagagccagccttcttattcggccttgaattgatcatatgcggattagaaaaacaacttaaatgtgaaagtgggtcttaa

SEQ ID NO: 791 - DNA, 627 bp, Artificial sequence
  SuR L7-4A01 CDS
atgggatctagattagataaaagtaaagtgattaacagcgcattagagctgcttaatgaggtcggaatcgaaggtttaacaacccgtaaactcgcccagaagctaggtgtagagcagcctacattgtattggcatgtaaaaaataagcgagctctgctcgacgcaatggccattgagatgctggataggcacgcgactcactattgccctttagaaggggaaagctggcaagattttttacgtaataacgctaaaagtatgagatgtgctttactaagtcatcgcgatggagcaaaagtatgtttaggtacaggctttacagaacagcaatatgaaactgccgaaaatagtctggcctttttatgccaacaaggtttttcactagagaacgcactgtatgcaatgcaggctgcttgtatttatactttaggttgcgtattgttggatcaagagcttcaagtcgctaaagaagaaagggaaacacctactactgatagtatgccgccattagtccgacaagttctggaattaaaggatcaccaaggtgcagagccagccttcttattcggccttgaattgatcatatgcggattagaaaaacaacttaaatgtgaaagtgggtcttaa

SEQ ID NO: 792 - DNA, 627 bp, Artificial sequence
  SuR L7-4A03 CDS
atgggatctagattagataaargkrragkgattaacagcgcattagagctgcttaatgaggtcggaatcgaaggtttaacaacccgtaaactcgcccagaagctaggtgtagagcagcctacattgtattggcatgtaaaaaataagcgagctctgctcgacgcaatggccattgagatgctggataggcacgcgactcactattgccctttagaaggggaaagctggcaagattttttacgtaataacgctaaaagtatgagatgtgctttactaagtcatcgcgatggagcaaaagtatgtttaggtacaggctttacagaacagcaatatgatactgccgaaaatagtctggcctttttatgccaacaaggtttttcactagagaacgcactgtatgcaatgcaggctgttggtatttatactttaggttgcgtattgttggatcaagagcttcaagtcgctaaagaagaaagggaaacacctactactgatagtatgccgccattagtccgacaagttctggaattaaaggatcaccaaggtgcagagccagtcttcttattcggccttgaattgatcatatgcggattagaaaaacaacttaaatgtgaaagtgggtcttaa

SEQ ID NO: 793 - DNA, 627 bp, Artificial sequence
  SuR L7-4A04 CDS
atgggatctagattagataaaagtaaagtgattaacagcgcattagagctgcttaatgaggtcggaatcgaaggtttaacaacccgtaaactcgcccagaagctaggtgtagagcagcctacattgtattggcatgtaaaaaataagcgagctctgctcgacgcattggccattgagatgctggataggcacgcgactcactattgccctttagaaggggaaagctggcaagattttttacgtaataacgctttaagtatgagatgtgctttactaagtcatcgcgatggagcaaaagtatgtttaggtacaggctttacagaaaagcaatatgaaactgccgaaaatagtatggcctttttatgccaacaaggtttttcactagagcacgcaatgtatgcaatgcaggctgctggtatttatactttaggttgcgtattgttggatcaagagcttcaagtcgctaaagaagaaagggaaacacctactactgatagtatgccgccattagtccgacaagctctggaattaaaggatcaccaaggtgcagagccagccttcttattcggccttgaattgatcatatgcggattagaaaaacaacttaaatgtgaaagtgggtcttaa

SEQ ID NO: 794 - DNA, 627 bp, Artificial sequence
  SuR L7-4A06 CDS
atgggatctagattagataaaagtaaagtgattaacagcgcattagagctgcttaatgaggtcggaatcgaaggtttaacaacccgtaaactcgcccagaagctaggtgtagagcagcctacattgtattggcatgtaaaaaataagcgagctctgctcgacgcaatggccattgagatgctggataggcacgcgactcactattgccctttagaaggggaaagctggcaagattttttacgtaataacgctaaaagtatgagatgtgctttactaagtcatcgcgatggagcaaaagtatgtttaggtacaggctttacagaacagcaatatgaaactgccgaaaatagtctggcctttttatgccaacaaggtttttcactagagaacgcaatgtatgcaatgcaggctgttggtatttatactttaggttgcgtattgttggatcaagagcttcaagtcgctaaagaagaaagggaaacacctactactgatagtatgccgccattactccgacaagttctggaattaaaggatcaccaaggtgcagagccagccttcttattcggccttgaattgatcatatgcggattagaaaaacaacttaaatgtgaaagtgggtcttaa

SEQ ID NO: 795 - DNA, 627 bp, Artificial sequence
  SuR L7-4A08 CDS
atgggatctagattagatwaaagkrragtgattaacagcgcattagagctgcttaatgaggtcggaatcgaaggtttaacaacccgtaaactcgcccagaagctaggtgtagagcagcctacattgtattggcatgtaaaaaataagcgagctctgctcgacgcaatggccattgagatgctggataggcacgcgactcactattgccctttagaaggggaaagctggcaagattttttacgtaataacgctaaaagtatgagatgtgctttactaagtcatcgcgatggagcaaaagtatgtttaggtacaggctttacagaacagcaatatgaagctgccgaaaatagtatggcctttttatgccaacaaggtttttcactagagcacgcaatgtatgcaatgcaggctgcttgtatttatactttaggttgcgtattgttggatcaagagcttcaagtcgctaaagaagaaagggaaacacctactactgatagtatgccgccattagtccgacaagctctggaattaaaggatcaccaaggtgcagagccagccttcttattcggccttgaattgatcatatgcggattagaaaaacaacttaaatgtgaaagtgggtcttaa

SEQ ID NO: 796 - DNA, 627 bp, Artificial sequence
  SuR L7-4A09 CDS
  misc_feature (166)..(166): n is a, c, g, or t
  misc_feature (330)..(330): n is a, c, g, or t
  misc_feature (511)..(511): n is a, c, g, or t
atgggatctagattagataaaagtaaagtgattaacagcgcattagagctgcttaatgaggtcggaatcgaaggtttaacaacccgtaaactcgcccagaagctaggtgtagagcagcctacattgtattggcatgtaaaaaataagcgagctctgctcgacgcantggccattgagatgctggataggcacgcgactcactattgccctttagaaggggaaagctggcaagattttttacgtaataacgctaaaagtatgagatgtgctttactaagtcatcgcgatggagcaaaagtatgtttaggtacaggctttacagaacagcantatgaaattgccgaaaatagtctggcctttttatgccaacaaggtttttcactagagcacgcaatgtatgcaatgcaggctgctggtatttatactttaggttgcgtattgttggatcaagagcttcaagtcgctaaagaagaaagggaaacacctactactgatagtatgccgccattantccgacaagctctggaattaaaggatcaccaaggtgcagagccagccttcttattcggccttgaattgatcatatgcggattagaaaaacaacttaaatgtgaaagtgggtcttaa

SEQ ID NO: 797 - DNA, 627 bp, Artificial sequence
  SuR L7-4A12 CDS
atgggatctagattagataaaagtaaagtgattaacagcgcattagagctgcttaatgaggtcggaatcgaaggtttaacaacccgtaaactcgcccagaagctaggtgtagagcagcctacattgtattggcatgtaaaaaataagcgagctctgctcgacgcattggccattgagatgctggataggcacgcgactcactattgccctttagaaggggaaagctggcaagattttttacgtaataacgctaaaagtatgagatgtgctttactaagtcatcgcgatggagcaaaagtatgtttaggtacaggctttacagaaaagcaatatgaagctgccgaaaatagtctggcctttttatgccaacaaggtttttcactagagcacgcactgtatgcaatgcaggctgttggtatttatactttaggttgcgtattgttggatcaagagcttcaagtcgctaaagaagaaagggaaacacctactactgatagtatgccgccattagtccgacaagttctggaattaaaggatcaccaaggtgcagagccagccttcttattcggccttgaattgatcatatgcggattagaaaaacaacttaaatgtgaaagtgggtcttaa

SEQ ID NO: 798 - DNA, 627 bp, Artificial sequence
  SuR L7-4B03 CDS
atgggatctagattagataaaagkrragkgattaacagcgcattagagctgcttawtgaggtcggaatcgaaggtttaacaacccgtaaactcgcccagaagctaggtgtagagcagcctacattgtattggcatgtaaaaaataagcgagctctgctcgacgcaatggccattgagatgctggataggcacgcgactcactattgccctttagaaggggaaagctggcaagattttttacgtaataacgctaaaagtatgagatgtgctttactaagtcatcgcgatggagcaaaagtatgtttaggtacaggctttacagaaaagctgtatgaaagtgccgaaaatagtctggcctttttatgccaacaaggtttttcactagagaacgcaatgtatgcaatgcaggctgtttgtatttttactttaggttgcgtattgttggatcaagagcttcaagtcgctaaagaagaaagggaaacacctactactgatagtatgccgccattactccgacaaggtctggaattaaaggatcaccaaggtgcagagccagccttcttattcggccttgaattgatcatatgcggattagaaaaacaacttaaatgtgaaagtgggtcttaa

SEQ ID NO: 799 - DNA, 627 bp, Artificial sequence
  SuR L7-4B04 CDS
atgggatctagattagataaaagtaaagtgattaacagcgcattagagctgcttaatgaggtcggaatcgaaggtttaacaacccgtaaactcgcccagaagctaggtgtagagcagcctacattgtattggcatgtaaaaaataagcgagctctgctcgacgcaatggccattgagatgctggataggcacgcgactcactattgccctttagaaggggaaagctggcaagattttttacgtaataacgctaaaagtatgagatgtgctttactaagtcatcgcgatggagcaaaagtatgtttaggtacaggctttacagaacagcaatatgaaagtgccgaaaatagtctggcctttttatgccaacaaggtttttcactagagcacgcaatgtatgcaatgcaggctgttggtatttttactttaggttgcgtattgttggatcaagagcttcaagtcgctaaagaagaaagggaaacacctactacagatagtatgccgccattactccgacaagctctggaattaaaggatcaccaaggtgcagagccagccttcttattcggccttgaattgatcatatgcggattagaaaaacaacttaaatgtgaaagtgggtcttaa

SEQ ID NO: 800 - DNA, 627 bp, Artificial sequence
  SuR L7-4B06 CDS
atgggatctagattagataaaagtaaagtgattaacagcgcattagagctgcttaatgaggtcggaatcgaaggtttaacaacccgtaaactcgcccagaagctaggtgtagagcagcctacattgtattggcatgtaaaaaataagcgagctctgctcgacgcattggccattgagatgctggataggcacgcgactcactattgccctttagaaggggaaagctggcaagattttttacgtaataacgctaaaagtatgagatgtgctttactaagtcatcgcgatggagcaaaagtatgtttaggtacaggctttacagaacagatgtatgaaggtgccgaaaatagtatggcctttttatgccaacaaggtttttcactagagcacgcaatgtatgcaatgcaggctgctggtatttatactttaggttgcgtattgttggatcaagagcttcaagtcgctaaagaagaaagggaaacacctactactgatagtatgccgccattagtccgacaagctctggaattaaaggatcaccaaggtgcagagccagccttcttattcggccttgaattgatcatatgcggattagaaaaacaacttaaatgtgaaagtgggtcttaa

SEQ ID NO: 801 - DNA, 627 bp, Artificial sequence
  SuR L7-4B07 CDS
  misc_feature (415)..(415): n is a, c, g, or t
atgggatctagattagataaaagtrargkgattaacagcgcattagagctgcttaatgaggtcggaatcgaaggtttaacaacccgtaaactcgcccagaagctaggtgtagagcagcctacattgtattggcatgtaaaaaataagcgagctctgctcgacgcaatggccattgagatgctggataggcacgcgactcactattgccctttagaaggggaaagctggcaagattttttacgtaataacgctaaaagtatgagatgtgctttactaagtcatcgcgatggagcaaaagtatgtttaggttcaggctttacagaacagcaatatgaaactgccgaaaatagtatggcctttttatgccaacaaggtttttcactagagaacgcaatgtatgcaatgcaggctgctngtatttttactttaggttgcgtattgttggatcaagagcttcaagtcgctaaagaagaaagggaaacacctactactgatagtatgccgccattagtccgacaagttctggaattaaaggatcaccaaggtgcagagccagccttcttattcggccttgaattgatcatatgcggattagaaaaacaacttaaatgtgaaagtgggtcytaa

SEQ ID NO: 802 - DNA, 627 bp, Artificial sequence
  SuR L7-4C01 CDS
atgggatctagattagataaaagtaaagtgattaacagcgcattagagctgctymwtgaggwcggaatcgaaggtttaacaacccgtaaactcgcccagaagctaggtgtagagcagcctacattgtattggcatgtaaaaaataagcgagctctgctcgacgcaatggccattgagatgctggataggcacgcgactcacatctgccctttagaagaggaaagctggcaagattttttacgtaataacgctaaaagtatgagatgtgctttactaagtcatcgcgatggagcaaaagtatgtttaggtacaggctttacagaacagcaatatgaaactgccgaaaatagtatggcctttttatgtcaacaaggtttttcactagagcacgcaatgtatgcaatgcaggctgcttgtatttatactttaggttgcgtattgttggatcaagagcttcaagtcgctaaagaagaaagggaaacacctactactgatagtatgccgccattagtccgacaagttctggaattaaaggatcaccaaggtgcagagccagccttcttattcggccttgaattgatcatatgcggattagaaaaacaacttaaatgtgaaagtgggtcttaa

SEQ ID NO: 803 - DNA, 627 bp, Artificial sequence
  SuR L7-4C03 CDS
atgggatctagattagataaaagkrargkgattaacagcgcattagagctgcttaatgaggtcggaatcgaaggtttaacaacccgtaaactcgcccagaagctaggtgtagagcagcctacattgtattggcatgtaaaaaataagcgagctctgctcgacgcaatggccattgagatgctggataggcacgcgactcacgtctgccctttagaaggggaaagctggcaagattttttacgtaataacgctaaaagtatgagatgtgctttactaagtcatcgcgatggagcaaaagtatgtttaggtacaggctttacagaacagcaatatgaaagtgccgaaaatagtctggcctttttatgccaacaaggtttttcactagagcacgcaatgtatgcaatgcaggctgctggtatttttactttaggttgcgtattgttggatcaagagcttcaagtcgctaaagaagaaagggaaacacctactactgatagtatgccgccattagtccgacaagctctggaattaaaggatcaccaaggtgcagagccagccttcttattcggccttgaattgatcatatgcggattagaaaaacaacttaaatgtgaaagtgggtcttaa

SEQ ID NO: 804 - DNA, 627 bp, Artificial sequence
  SuR L7-4C04 CDS
atgggatctagattasmtwwaagtaaagtgattaacagcgcattagagctgcttaatgaggtcggaatcgaaggtttaacaacccgtaaactcgcccagaagctaggtgtagagcagcctacattgtattggcatgtaaaaaataagcgagctctgctcgacgcaatggccattgagatgctggataggcacgcgactcacatgtgccctttagaaggggaaagctggcaagattttttacgtaataacgctaaaagtatgagatgtgctttactaagtcatcgcgatggagcaaaagtatgtttaggtacaggctttacagaacagcactatgaaactgccgaaaatagtatggcctttttatgccaacaaggtttttcactagagaacgcaatgtatgcaatgcaggctgctggtatttatactttaggttgcgtattgttggatcaagagcttcaagtcgctaaagaagaaagggaaacacctactactgatagtatgccgccattagtccgacaagttctggaattaaaggatcaccaaggtgcagagccagccttcttattcggccttgaattgatcatatgcggattagaaaaacaacttaaatgtgaaagtgggtcttaa

SEQ ID NO: 805 - DNA, 627 bp, Artificial sequence
  SuR L7-4C06 CDS
atgggatctagattagataaaagtarrgtgattaacagcgcattagagctgcttawtgaggtcggaatcgaaggtttaacaacccgtaaactcgcccagaagctaggtgtagagcagcctacattgtattggcatgtaaaaaataagcgagctctgctcgacgcaatggccattgagatgctggataggcacgcgactcactattgccctttagaaggggaaagctggcaagattttttacgtaataacgctaaaagtatgagatgtgctttactaagtcatcgcgatggagcaaaagtatgtttaggtacaggctttacagaacagcaatatgaagctgccgaaaatagtctggcctttttatgccaacaaggtttttcactagagaacgcactgtatgcaatgcaggctgttggtatttttactttaggttgcgtattgttggatcaagagcttcaagtcgctaaagaagaaagggaaacacctactactgatagtatgccgccattagtccgacaaggtctggaattaaaggatcaccaaggtgcagagccagccttcttattcggccttgaattgatcatatgcggattagaaaaacaacttaaatgtgaaagtgggtcytaa

SEQ ID NO: 806 - DNA, 627 bp, Artificial sequence
  SuR L7-4C09 CDS
atgggatctagattagataaaagtaaagtgattaacagcgcattagagctgcttaatgaggtcggaatcgaaggtttaacaacccgtaaactcgcccagaagctaggtgtagagcagcctacattgtattggcatgtaaaaaataagcgagctctgctcgacgcaatggccattgagatgctggataggcacgcgactcactattgccctttagaaggggaaagctggcaagattttttacgtaataacgctaaaagtatgagatgtgctttactaagtcatcgcgatggagcaaaagtatgtttaggtacaggctttacagaacagcaatatgaaagtgccgaaaatagtctggcctttttatgccaacaaggtttttcactagagaacgcaatgtatgcaatgcaggctgctggtatttttactttaggttgcgtattgttggatcaagagcttcaagtcgctaaagaagaaagggaaacacctactactgatagtatgccgccattagtccgacaagctctggaattaaaggatcaccaaggtgcagagccagccttcttattcggccttgaattgatcatatgcggattagaaaaacaacttaaatgtgaaagtgggtcttaa

SEQ ID NO: 807 - DNA, 627 bp, Artificial sequence
  SuR L7-4C12 CDS
atgggatctagattagataaaagtaaagtgattaacagcgcattagagctgcttaatgaggtcggaatcgaaggtttaacaacccgtaaactcgcccagaagctaggtgtagagcagcctacattgtattggcatgtaaaaaataagcgagctctgctcgacgcaatggccattgagatgctggataggcacgcgactcacttctgccctttagaaggggaaagctggcaagattttttacgtaataacgctaaaagtatgagatgtgctttactaagtcatcgcgatggagcaaaagtatgtttaggtacaggctttacagaacagcactatgaaagtgccgaaaatagtctggcctttttatgccaacaaggtttttcactagagaacgcaatgtatgcaatgcaggctgttggtatttatactttaggttgcgtattgttggatcaagagcttcaagtcgctaaagaagaaagggaaacacctactactgatagtatgccgccattagtccgacaagttctggaattaaaggatcaccaaggtgcagagccagccttcttattcggccttgaattgatcatatgcggattagaaaaacaacttaaatgtgaaagtgggtcttaa

SEQ ID NO: 808 - DNA, 627 bp, Artificial sequence
  SuR L7-4D04 CDS
atgggatctagattasataaaagtaaagtgattaacagcgcattagagctgcttaatgaggtcggaatcgaaggtttaacaacccgtaaactcgcccagaagctaggtgtagagcagcctacattgtattggcatgtaaaaaataagcgagctctgctcgacgcaatggccattgagatgctggataggcacgcgactcacgtctgccctttagaaggggaaagctggcaagattttttacgtaataacgctaaaagtatgagatgtgctttactaagtcatcgcgatggagcaaaagtatgtttaggtacaggctttacagaacagcaatatgaaactgccgaaaatagtctggcctttttatgccaacaaggtttttcactagagcacgcactgtatgcaatgcaggctgttggtatttatactttaggttgcgtattgttggatcaagagcttcaagtcgctaaagaagaaagggaaacacctactactgatagtatgccgccattagtccgacaagttctggaattaaaggatcaccaaggtgcagagccagccttcttattcggccttgaattgatcatatgcggattagaaaaacaacttaaatgtgaaagtgggtcttaa

SEQ ID NO: 809 - DNA, 627 bp, Artificial sequence
  SuR L7-4D07 CDS
atgggatctagattmsmtwaaagtraagtgattaacagcgcattagagctgcttaatgaggtcggaatcgaaggtttaacaacccgtaaactcgcccagaagctaggtgtagagcagcctacattgtattggcatgtaaaaaataagcgagctctgctcgacgcattggccattgagatgctggataggcacgcgactcactattgccctttagaaggggaaagctggcaagattttttacgtaataacgctaaaagtatgagatgtgctttactaagtcatcgcgatggagcaaaagtatgtttaggtacaggctttacagaaaagcaatatgaagctgccgaaaatagtatggcctttttatgccaacaaggtttttcactagagcacgcactgtatgcaatgcaggctgttggtatttatactttaggttgcgtattgttggatcaagagcttcaagtcgctaaagaagaaagggaaacacctactactgatagtatgccgccattagtccgacaagctctggaattaaaggatcaccaaggtgcagagccagccttcttattcggccttgaattgatcatatgcggattagaaaaacaacttaaatgtgaaagtgggtcytaa

SEQ ID NO: 810 - DNA, 627 bp, Artificial sequence
  SuR L7-4D08 CDS
atgggatctagattagwtwaamgkrragygattaacagcgcattagagctgcttaatgaggtcggaatcgaaggtttaacaacccgtaaactcgcccagaagctaggtgtagagcagcctacattgtattggcatgtaaaaaataagcgagctctgctcgacgcaatggccattgagatgctggataggcacgcgactcactattgccctttagaaggggaaagctggcaagattttttacgtaataacgctaaaagtatgagatgtgctttactaagtcatcgcgatggagcaaaagtatgtttaggtacaggctttacagaacagcaatatgaaagtgccgaaaatagtatggcctttttatgccaacaaggtttttcactagagaacgcaatgtatgcaatgcaggctgctggtatttttactttaggttgcgtattgttggatcaagagcttcaagtcgctaaagaagaaagggaaacacctactactgatagtatgccgccattactccgacaagttctggaattaaaggatcaccaaggtgcagagccagccttcttattcggccttgaattgatcatatgcggattagaaaaacaacttaaatgtgaaagtgggtcyyma

SEQ ID NO: 811 - DNA, 627 bp, Artificial sequence
  SuR L7-4D10 CDS
atgggatctagattagatwaaagtarrgkgattaacagcgcattagagctgcttawtgaggtcggaatcgaaggtttaacaacccgtaaactcgcccagaagctaggtgtagagcagcctacattgtattggcatgtaaaaaataagcgagctctgctcgacgcaatggccattgagatgctggataggcacgcgactcacttctgccctttagaaggggaaagctggcaagattttttacgtaataacgctaaaagtatgagatgtgctttactaagtcatcgcgatggagcaaaagtatgtttaggtacaggctttacagaacagcaatatgaagctgccgaaaatagtatggcctttttatgccaacaaggtttttcactagagaacgcaatgtatgcaatgcaggctgttggtatttttactttaggttgcgtattgttggatcaagagcttcaagtcgctaaagaagaaagggaaacacctactactgatagtatgccgccattagtccgacaagttctggaattaaaggatcaccaaggtgcagagccagccttcttattcggccttgaattgatcatatgcggattagaaaaacaacttaaatgtgaaagtgggtcttaa

SEQ ID NO: 812 - DNA, 627 bp, Artificial sequence
  SuR L7-4D11 CDS
atgggatctagattasatwaaagtaaagtgattaacagcgcattagagctgcttaatgaggtcggaatcgaaggtttaacaacccgtaaactcgcccagaagctaggtgtagagcagcctacattgtattggcatgtaaaaaataagcgagctctgctcgacgcaatggccattgagatgctggataggcacgcgactcactattgccctttagaaggggaaagctggcaagattttttacgtaataacgctaaaagtatgagatgtgctttactaagtcatcgcgatggagcaaaagtatgtttaggtacaggctttacagaacagcaatatgaaactgccgaaaatagtatggcctttttatgccaacaaggtttttcactagagcacgcaatgtatgcaatgcaggctgttggtatttatactttaggttgcgtattgttggatcaagagcttcaagtcgctaaagaagaaagggaaacacctactactgatagtatgccgccattactccgacaagttctggaattaaaggatcaccaaggtgcagagccagccttcttattcggccttgaattgatcatatgcggattagaaaaacaacttaaatgtgaaagtgggtcttaa

SEQ ID NO: 813 - DNA, 627 bp, Artificial sequence
  SuR L7-4E01 CDS
atgggatctagattagataaaagtaaagtgattaacagcgcattagagctgcttaatgaggtcggaatcgaaggtttaacaacccgtaaactcgcccagaagctaggtgtagagcagcctacattgtattggcatgtaaaaaataagcgagctctgctcgacgcaatggccatggagatgctggataggcacgcgactcactattgccctttagaaggggaaagctggcaagattttttacgtaataacgctaaaagtatgagatgtgctttactaagtcatcgcgatggagcaaaagtatgtttaggtacaggctttacagaacagcaatatgaaagtgccgaaaatagtatggcctttttatgccaacaaggtttttcactagagaacgcactgtatgcaatgcaggctgttggtatttatactttaggttgcgtattgttggatcaagagcttcaagtcgctaaagaagaaagggaaacacctactactgatagtatgccgccattagtccgacaaggtctggaattaaaggatcaccaaggtgcagagccagccttcttattcggccttgaattgatcatatgcggattagaaaaacaacttaaatgtgaaagtgggtcttaa

SEQ ID NO: 814 - DNA, 627 bp, Artificial sequence
  SuR L7-4E02 CDS
  misc_feature (536)..(536): n is a, c, g, or t
atgggatctagattagataaaagtaaagtgattaacagcgcattagagctgcttaatgaggtcggaatcgaaggtttaacaacccgtaaactcgcccagaagctaggtgtagagcagcctacattgtattggcatgtaaaaaataagcgagctctgctcgacgcattggccattgagatgctggataggcacgcgactcactattgccctttagaaggggaaagctggcaagattttttacgtaataacgctaaaagtatgagatgtgctttactaagtcatcgcgatggagcaaaagtatgtttaggtacaggctttacagaacagcaatatgaagctgccgaaaatagtctggcctttttatgccaacaaggtttttcactagagcacgcactgtatgcaatgcaggctgctggtatttatactttaggttgcgtattgttggatcaagagcttcaagtcgctaaagaagaaagggaaacacctactactgatagtatgccgccattactccgacaaggtctggaattaaaggntcaccaaggtgcagagccagccttcttattcggccttgaattgatcatatgcggattagaaaaacaacttaaatgtgaaagtgggtcttaa

SEQ ID NO: 815 - DNA, 627 bp, Artificial sequence
  SuR L7-4E04 CDS
atgggatctagattmsmtwwaagkraagtgattaacagcgcattagagctgcttaatgaggtcggaatcgaaggtttaacaacccgtaaactcgcccagaagctaggtgtagagcagcctacattgtattggcatgtaaaaaataagcgagctctgctcgacgcaatggccattgagatgctggataggcacgcgactcactattgccctttagaaggggaaagctggcaagattttttacgtaataacgctaaaagtatgagatgtgctttactaagtcatcgcgatggagcaaaagtatgtttaggtacaggctttacagaacagcaatatgaaactgccgaaaatagtctggcctttttatgccaacaaggtttttcactagagaacgcaatgtatgcaatgcaggctgctggtatttatactttaggttgcgtattgttggatcaagagcttcaagtcgctaaagaagaaagggaaacacctactactgatagtatgccgccattactccgacaagttctggaattaaaggatcaccaaggtgcagagccagccttcttattcggccttgaattgatcatatgcggattagaaaaacaacttaaatgtgaaagtgggtcytaa

SEQ ID NO: 816 - DNA, 627 bp, Artificial sequence; identical to SEQ ID NO: 718
  SuR L7-4E05 CDS

SEQ ID NO: 817 - DNA, 627 bp, Artificial sequence
  SuR L7-4E07 CDS
atgggatctagattagataaaagtaaagtgattaacagcgcattagagctgcttaatgaggtcggaatcgaaggtttaacaacccgtaaactcgcccagaagctaggtgtagagcagcctacattgtattggcatgtaaaaaataagcgagctctgctcgacgcaatggccattgagatgctggataggcacgcgactcactattgccctttagaaggggaaagctggcaagattttttacgtaataacgctaaaagtatgagatgtgctttactaagtcatcgcgatggagcaaaagtatgtttaggtacaggctttacagaacagcaatatgaaactgccgaaaatagtatggcctttttatgccaacaaggtttttcactagagaacgcactgtatgcaatgcaggctgctggtatttttactttaggttgcgtattgttggatcaagagcttcaagtcgctaaagaagaaagggaaacacctactactgatagtatgccgccattagtccgacaagttctggaattaaaggatcaccaaggtgcagagccagccttcttattcggccttgaattgatcatatgcggattagaaaaacaacttaaatgtgaaagtgggtcttaa

SEQ ID NO: 818 - DNA, 627 bp, Artificial sequence
  SuR L7-4E08 CDS
atgggatctagattagataaaagtaaagtgattaacagcgcattagagctgcttaatgaggtcggaatcgaaggtttaacaacccgtaaactcgcccagaagctaggtgtagagcagcctacattgtattggcatgtaaaaaataagcgagctctgctcgacgcaatggccattgagatgctggataggcacgcgactcacatctgccctttagaaggggaaagctggcaagattttttacgtaataacgctaaaagtatgagatgtgctttactaagtcatcgcgatggagcaaaagtatgtttaggtacaggctttacagaacagcaatatgaaactgccgaaaatagtatggcctttttatgccaacaaggtttttcactagagaacgcaatgtatgcaatgcaggctgtttgtatttatactttaggttgcgtattgttggatcaagagcttcaagtcgctaaagaagaaagggaaacacctactactgatagtatgccgccattagtccgacaagctctggaattaaaggatcaccaaggtgcagagccagccttcttattcggccttgaattgatcatatgcggattagaaaaacaacttaaatgtgaaagtgggtcttaa

SEQ ID NO: 819 - DNA, 624 bp, Artificial sequence
  SuR L6-3A09 CDS
atgggatctagattagataaaagtaaagtgattaacagcgcattagagctgcttaatgaggtcggaatcgaaggtttaacaacccgtaaactcgcccagaagctaggtgtagagcagcctacattgtattggcatgtaaaaaataagcgagctctgctcgacgccttagccattgagatgatggataggcaccaaactcacttgtgccctttagaaggggaaagctggcaagattttttacgtaataatgctaaaagtatgagatgtgctttactaagccatcgcgatggagcaaaagtatgtttaggtacacgctggacagaacaaatgtatgaagctgctgaaaatatgttagcctttttatgccaacaaggtttttcactagagaatgcattatatgcagtgagtgctgtgagggtgtttactttaggttgcgtattgtttgatcaagagagccaagtcgctaaagaagaaagggaaacacctactactgctagtatgccgccattagtgcgacaagcttgggaattaaaggatcaccaaggtgcagagccagccttcttattcggccttgaattgatcatatgcggattagaaaaacaacttaaatgcgaaagtgggtct

SEQ ID NO: 820 - DNA, 624 bp, Artificial sequence
  SuR L7-4C06(E03) CDS
atgggatctagattagataaaagtaaagtgattaacagcgcattagagctgcttawtgaggtcggaatcgaaggtttaacaacccgtaaactcgcccagaagctaggtgtagagcagcctacattgtattggcatgtaaaaaataagcgagctctgctcgacgcaatggccattgagatgctggataggcacgcgactcactattgccctttagaaggggaaagctggcaagattttttacgtaataacgctaaaagtatgagatgtgctttactaagtcatcgcgatggagcaaaagtatgtttaggtacaggctttacagaacagcaatatgaagctgccgaaaatagtctggcctttttatgccaacaaggtttttcactagagaacgcactgtatgcaatgcaggctgttggtatttttactttaggttgcgtattgttggatcaagagcttcaagtcgctaaagaagaaagggaaacacctactactgatagtatgccgccattagtccgacaaggtctggaattaaaggatcaccaaggtgcagagccagccttcttattcggccttgaattgatcatatgcggattagaaaaacaacttaaatgtgaaagtgggtct

SEQ ID NO: 821 - DNA, 621 bp, Artificial sequence
  SuR L10-84(B12) CDS
atggccagactcgacaagagcaaggtgatcaacagcgcactggagctgctgaacgaggtcggaatcgaaggcctcacaacccgtaagctcgcccagaagctcggggttgagcagcctacattgtactggcacgtcaagaacaagcgagctctgctagacgctatggccattgagatgctcgatcgccacgctccccacttgagtctcttggaaggggaaagctggcaagacttcttgaggaacaacgctaagtccatgagaaacgctttgctcagtcaccgtgatggagccaaggtctgtctaggtacgggcttcacggagcaaaactatgaaactgctgagaacagccttgccttcctgacacaacaaggtttctcccttgagaacgccctctacgcatggcaagcactggggatctacactctgggttgcgcgttgctggatcaagagctgcaagtcgctaaggaggagagggaaacacctactactgatagtatgccgccactggttcgacaagctctggaactcaaggatcaccaaggtgcagagccagccttcctgttcggccttgaactgatcatagcaggattggagaagcagctgaaggccgaaagtgggtct

SEQ ID NO: 822 - DNA, 621 bp, Artificial sequence
  SuR L13-2-46(D10) CDS
atggccagactcgacaagagcaaggtgatcaacagcgcactggagctgctgaacgaggtcggaatcgaaggcctcacaacccgtaagctcgcccagaagctcggggttgagcagcctacattgtactggcacgtcaagaacaagcgagctctgctagacgctatggccattgagatgttcgataggcacaagacccactactgtcctttggaaggggaaagctggcaagacttcttgaggaacagggctaagtccatgagaaatgctttgctcagtcaccgtgatggagccaaggtcgctctaggtacgggcttcacggagcaacagtatgaaactatggagaactgtcttgccttcctgacacaacaaggtttctcccttgagaacgccctctacgcaatgcaagctgttgggatctacactctgggttgcgtcttgctggatcaagagctgcaagtcgctaaggaggagagggaaacacctactactgatagtatgccgccactggttcgacaagcttacgaactcagagatcaccaaggtgcagagccagccttcctgttcggccttgaactgatcataagtggattggagaagcagctgaaggcagaaagtgggtct

SEQ ID NO: 823 - DNA, 621 bp, Artificial sequence
  SuR L12-1-10 CDS
atggccagactcgacaagagcaaggtgatcaacagcgcactggagctgctgaacgaggtcggaatcgaaggcctcacaacccgtaagctcgcccagaagctcggggttgagcagcctacattgtactggcacgtcaagaacaagcgagctctgctagacgctatggccttcgagatgctcgatcgccacgctatacactttttaccattggaaggggcaagctggcaaaatttcttgaggaacaccgctaagtccatgagaaacgctttgctcagtcaccgtgatggagccaaggtctgtctaggtacgggcttcacggagcgacaatatgaaactgcggagaaccgccttgccttcctgacacaacaaggtttctcccttgagcaggccctctacgcatggcaagcagtggggatctacactctgggttgtgtcttgctggatcaagagctgcaagtcgctaaggaggagagggaaacacctactactgatagtatgccgccactggttcgacaagcttgggaactcaaggatcaccaaggtgcagagccagccttcctgttcggccttgaactgatcatatcaggattggagaagcagctgaaggcagaaagtgggtct

SEQ ID NO: 824 - DNA, 621 bp, Artificial sequence
  SuR L13-2-23 CDS
atggccagactcgacaagagcaaggtgatcaacagcgcactggagctgctgaacgaggtcggaatcgaaggcctcacaacccgtaagctcgcccagaagctcggggttgagcagcctacattgtactggcacgtcaagaacaagcgagctctgctagacgctatggccattgagatgctcgatcgccacgctatacacttgttacccttggaaggggaaagctggcaagacttcttgaggaacaacgctaagtccatgagatgcgctttgctcagtcaccgtgatggagccaaggtctgtctaggtacgggcttcacggagcaacaatatgaaactgcggagaaccgccttgccttcctgacacaacaaggtttctcccttgagaacgccctctacgcatggcaagcagtggggatctacactctgggttgtgtcttgctggatcaagagctgcaagtcgctaaggaggagagggaaacacctactactgatagtatgccgccactggttcgacaagctctggaactcaaggatcaccaaggtgcagagccagccttcctgttcggccttgaactgatcataggcggattggagaagcagctgaagagtgaaagtgggtct

SEQ ID NO: 825 - DNA, 621 bp, Artificial sequence
  SuR L7-1C3-A5 comprising plant preferred codons
atggccagactcgacaagagcaaggtgatcaacagcgcactggagctgctgaacgaggtcggaatcgaaggcctcacaacccgtaaactcgcccagaagctcggggtagagcagcctacattgtattggcacgtcaagaacaagcgagctctgctagacgctatggccattgagatgctcgataggcacgctacccacgtgtgccctttggaaggggaaagctggcaagacttcttgaggaacaacgctaagatcatgagatgtgctttgctcagtcaccgtgatggagccaaggtctgtctaggtacaggcttcacggagcaacagtatgaaactgctgagaacagccttgccttcctgtgccaacaaggtttctcccttgagcatgccctctacgcaatgcaggctgctgggatcttcactctgggttgcgtattgctggatcaagagctgcaagtcgctaaggaggagagggaaacacctactactgatagtatgccgccactggttcgacaagctctggaactcaacgatcaccaaggtgcagagccagccttcctgttcggccttgaattgatcatatgcggattggagaagcagctgaagtgtgaaagtgggtct

SEQ ID NO: 826 - DNA, 621 bp, Artificial sequence
  SuR L7-1F8-A11 comprising plant-preferred codons
atggccagactcgacaagagcaaggtgatcaacagcgcactggagctgctgaacgaggtcggaatcgaaggcctcacaacccgtaaactcgcccagaagctcggggtagagcagcctacattgtattggcacgtcaagaacaagcgagctctgctagacgctatggccattgagatgctcgataggcacgctacccactactgccctttggaaggggaaagctggcaagacttcttgaggaacaacgctaagtccatgagatgtgctttgctcagtcaccgtgatggagccaaggtctgtctaggtacaggcttcacggagcaacagtatgaaactgctgagaacagccttgccttcctgtgccaacaaggtttctcccttgagaacgccctctacgcaatgcaggctgttgggatctatactctgggttgcgtattgctggatcaagagctgcaagtcgctaaggaggagagggaaacacctactactgatagtatgccgccactggttcgacaagctctggaactcaaggatcaccaaggtgcagagccagccttcctgttcggccttgaattgatcatatgcggattggagaagcagctgaagtgtgaaagtgggtct

SEQ ID NO: 827 - DNA, 621 bp, Artificial sequence
  SuR L7-1G6-B2 comprising plant preferred codons
atggccagactcgacaagagcaaggtgatcaacagcgcactggagctgctgaacgaggtcggaatcgaaggcctcacaacccgtaaactcgcccagaagctcggggtagagcagcctacattgtattggcacgtcaagaacaagcgagctctgctagacgctatggccattgagatgctcgataggcacgctacccactactgccctttggaaggggaaagctggcaagacttcttgaggaacaacgctaagtccatgagatgtgctttgctcagtcaccgtgatggagccaaggtctgtctaggtacaggcttcacggagcaacagtatgaaactgctgagaacagcatggccttcctgtgccaacaaggtttctcccttgagaacgccctctacgcaatgcaggctgttgggatctatactctgggttgcgtattgctggatcaagagctgcaagtcgctaaggaggagagggaaacacctactactgatagtatgccgccactggttcgacaagctctggaactcaaggatcaccaaggtgcagagccagccttcctgttcggccttgaattgatcatatgcggattggagaagcagctgaagtgtgaaagtgggtct

SEQ ID NO: 828 - DNA, 621 bp, Artificial sequence
  SuR L7-3E3-D1 comprising plant-preferred codons
atggccagactcgacaagagcaaggtgatcaacagcgcactggagctgctgaacgaggtcggaatcgaaggcctcacaacccgtaaactcgcccagaagctcggggtagagcagcctacattgtattggcacgtcaagaacaagcgagctctgctagacgctatggccattgagatgctcgataggcacgctacccactactgccctttggaaggggaaagctggcaagacttcttgaggaacaacgctaagtccatgagatgtgctttgctcagtcaccgtgatggagccaaggtctgtctaggtacaggcttcacggagcaacagtatgaaactgctgagaacagccttgccttcctgtgccaacaaggtttctcccttgagcatgccatgtacgcaatgcaggctgctgggatctatactctgggttgcgtattgctggatcaagagctgcaagtcgctaaggaggagagggaaacacctactactgatagtatgccgccactggttcgacaagctctggaactcaaggatcaccaaggtgcagagccagccttcctgttcggccttgaattgatcatatgcggattggagaagcagctgaagtgtgaaagtgggtct

SEQ ID NO: 829 - DNA, 627 bp, Artificial sequence
  rSuR L1-18 CDS
atgggatctagattagataaaagtaaagtgattaacagcgcattagagctgcttaatgaggtcggaatcgaaggtttaacaacccgtaaactcgcccagaagctaggtgtagagcagcctacattgtattggcatgtaaaaaataagcgagctctgctcgacgccttagccattgagatgctggataggcacctgactcacttttgccctttagaaggggaaagctggcaagattttttacgtaataacgctaaaagtatgagatgtgctttactaagtcatcgcgatggagcaaaagtatggttaggtacaggctttacagaaaaacagtatgaaactaaggaaaatcggttagcctttttatgccaacaaggtttttcactagagaatgcattatatgcaatccgcgctgtgtcgcgttttactttaggttgcgtattgcaggatcaagagcctcaagtcgctaaagaagaaagggaaacacctactactgatagtatgccgccattattacgacaagctgtggaattatttgatcaccaaggtgcagagccagccttcttattcggccttgaattgatcatatgcggattagaaaaacaacttaaatgtgaaagtgagtcttaa

SEQ ID NO: 830 - DNA, 627 bp, Artificial sequence
  rSuR L1-21 CDS
atgggatctagattagataaaagtaaagtgattaacagcgcattagagctgcttaatgaggtcggaatcgaaggtttaacaacccgtaaactcgcccagaagctaggtgtagagcagcctacattgtattggcatgtaaaaaataagcgagctctgctcgacgccttagccattgagatgctggataggcacgcgactcacttttgccctttagaaggggaaagctggcaagattttttacgtaataacgctaaaagttttagatgtgctttactaagtcatcgcgatggagcaaaagtatgtttaggtacagcgggtacagaaaaacagtatgaaactctcgaaaattgtttagcctttttatgccaacaaggtttttcactagagaatgcattatatgcaaggagcgctgtggtgtgttttactttaggttgcgtattgtttgatcaagagatgcaagtcgctaaagaagaaagggaaacacctactactgatagtatgccgccattattacgacaagctgcggaattactggatcaccaaggtgcagagccagccttcttattcggccttgaattgatcatatgcggattagaaaaacaacttaaatgtgaaagtgggtcttaa

SEQ ID NO: 831 - DNA, 627 bp, Artificial sequence
  rSuR L1-25 CDS
atgggatctagattagataaaagtaaagtgattaacagcgcattagagctgcttaatgaggtcggaatcgaaggtttaacaacccgtaaactcgcccagaagctaggtgtagagcagcctacattgtattggcatgtaaaaaataagcgagctctgctcgacgccttagccattgagatgctggataggcacgcgactcacttttgccctttagaaggggaaagctggcaagattttttacgtaatactgctaaaagtatgagatgtgctttactaagtcatcgcgatggagcaaaagtacttttaggtacagcgactacagaaaaacagtatgaaactctcgaaaatttgttagcctttttataccaacaaggtttttcactagagaatgcattatatgcatggcaggctgtgtggcgttttactttaggttgcgtattgattgatcaagagacgcaagtcgctaaagaagaaagggaaacacctactactgatagtatgccgccattattacgacaagctgtggaattaaaggatcaccaaggtgcagagccagccttcttattcggccttgaattgatcatatgcggattagaaaaacaacttaaatgtgaaactgggtcttaa

SEQ ID NO: 832 - DNA, 627 bp, Artificial sequence
  rSuR L1-33 CDS
atgggatctagattagataaaagtaaagtgattaacagcgcattagagctgcttaatgaggtcggaatcgaaggtttaacaacccgtaaactcgcccagaagctaggtgtagagcagcctacattgtattggcatgtaaaaaataagcgagctctgctcgacgccttagccattgagatgctggataggcacgcgactcacttttgccctttagaaggggaaagctggcaagattttttacgtaataacgctaaaagtatgagatgtgctttactaagtcatcgcgatggagcaaaagtacagttaggtacagcggcgacagaaaaacagtatgaaactctggaaaataagttagcctttttatgccaacaaggtttttcactagagaatgcattatatgcacacagcgctgtgactcagtttactttaggttgcgtattgcgggatcaagagggtcaagtcgctaaagaagaaagggaaacacctactactgatagtatgccgccattattacgacaagctcgggaattacgtgatcaccaaggtgcagagccagccttcttattcggccttgaattgatcatatgcggattagaaaaacaacttaaatgtgaaagtgggtcttaa

SEQ ID NO: 833 - DNA, 627 bp, Artificial sequence
  rSuR L1-34 CDS
atgggatctagattagataaaagtaaagtgattaacagcgcattagagctgcttaatgaggtcggaatcgaaggtttaacaacccgtaaactcgcccagaagctaggtgtagagcagcctacattgtattggcatgtaaaaaataagcgagctctgctcgacgccttagccattgagatggcggataggcacaatactcacttttgccctttagaaggggaaagctggcaagattttttacgtaatgctgctagaagtatgagatgtgctttactaagtcatcgcgatggagccaaagtatatttaggtacagcgaggacagaaaaacagtatgaaactaccgaaaatgttttagcctttttatgccaacaaggtttttcactagagaatgcattatatgcagtgcgcgctgtgcctcgttttactttaggttgcgtattgttggatcaagagaggcaagtcgctaaagaagaaagggaaacacctactactgatagtatgccgccattattacgacaagctagggaattaacggatcaccaaggtgcagagccagccttcttattcggccttgaattgatcatatgcggattagaaaaacaacttaaatgtgaaagtgggtcttaa

SEQ ID NO: 834 - DNA, 627 bp, Artificial sequence
  rSuR L1-36 CDS
atgggatctagattagataaaagtaaagtgattaacagcgcattagagctgcttaatgaggtcggaatcgaaggtttaacaacccgtaaactcgcccagaagctaggtgtagagcagcctacattgtattggcatgtaaaaaataagcgagctctgctcgacgccttagccattgagatggcggataggcaccatactcacttttgccctttagaaggggaaagctggcaagattttttacgtaatgctgctaaaagtatgagatgtgctttactaagtcatcgcgatggagcaaaagtacgtttaggtacagcgtggacagaaaaacagtatgaaactcacgaaaatgtgttagcctttttatgccaacaaggtttttcactagagaatgcattatatgcactgaaggctgtgtcagggtttactttaggttgcgtattgaaggatcaagagatgcaagtcgctaaagaagaaagggaaacacctactactgatagtatgccgccattattacgacaagctactgaattagttgatcaccaaggtgcagagccagccttcttattcggccttgaattgatcatatgcggattagaaaaacaacttaaatgtgaaagtgggtcttaa

SEQ ID NO: 835 - DNA, 627 bp, Artificial sequence
  rSuR L1-39 CDS
atgggatctagattagataaaagtaaagtgattaacagcgcattagagctgcttaatgaggtcggaatcgaaggtttaacaacccgtaaactcgcccagaagctaggtgtagagcagcctacattgtattggcatgtaaaaaataagcgagctctgctcgacgccttagccattgagatgatggataggcaccagactcacttttgccctttagaaggggaaagctggcaagattttttacgtaatactgctaaaagttatagatgtgctttactaagtcatcgcgatggagcaaaagtaattttaggtacacgctggacagaaaaacagtatgaaactcgcgaaaatgttttagcctttttatgccaacaaggtttttcactagagaatgcattatatgcatgggccgctgtgggtccgtttactttaggttgcgtattgcgtgatcaagagcggcaagtcgctaaagaagaaagggaaacacctactactgatagtatgccgccattattacgacaagctttggaattaatggatcaccaaggtgcagagccagccttcttattcggccttgaattgatcatatgcggattagaaaaacaacttaaatgtgaaagtgggtcttaa

SEQ ID NO: 836 - DNA, 627 bp, Artificial sequence
  rSuR L1-41 CDS
atgggatctagattagataaaagtaaagtgattaacagcgcattagagctgcttaatgaggtcggaatcgaaggtttaacaacccgtaaactcgcccagaagctaggtgtagagcagcctacattgtattggcatgtaaaaaataagcgagctctgctcgacgccttagccattgagatgctggataggaaccagactcacttttgccctttagaaggggaaagctggcaagattttttacgtaataacgctaaaagttggagatgtgctttactaagtcatcgcgatggagcaaaagtaatgttaggtacacgcaatacagaaaaacagtatgaaactgccgaaaatgggttagcctttttatgccaacaaggtttttcactagagaatgcattatatgcatgccgcgctgtgtggacgtttactttaggttgcgtattggatgatcaagagacgcaagtcgctaaagaagaaagggaaacacctactagtgatagtatgccgccattattacgacaagctatggaattaaaggatcaccaaggtgcagagccagccttcttattcggccttgaattgatcatatgcggattagaaaaacaacttaaatgtgaaagtgggtcttaa

SEQ ID NO: 837 - DNA, 48 bp, Artificial sequence
  Oligo tetO1
cctaatttttgttgacactctatcattgatagagttattttaccactc

SEQ ID NO: 838 - DNA, 48 bp, Artificial sequence
  Oligo tetO2
ggattaaaaacaactgtgagatagtaactatctcaataaaatggtgag

SEQ ID NO: 839 - DNA, 48 bp, Artificial sequence
  Oligo control
cctaatttttgttgactgtgttagtccatagctggtattttaccactc

SEQ ID NO: 840 - DNA, 48 bp, Artificial sequence
  Oligo Control Complement
ggattaaaaacaactgacacaatcaggtatcgaccataaaatggtgag

SEQ ID NO: 841 - DNA, 8131 bp, Artificial sequence
  PHP37586A
cgcgccggtacccgggtaccgagctcactagacgcggtgaaattacctaattaacaccggtgtttatcaaacaagtttgtacaaaaaagcaggctccggccagaatggcccggaccgggttaccgaattctagaaatccgtcaacatggtggagcacgacactctcgtctactccaagaatatcaaagatacagtctcagaagaccaaagggctattgagacttttcaacaaagggtaatatcgggaaacctcctcggattccattgcccagctatctgtcacttcatcaaaaggacagtagaaaaggaaggtggcacctacaaatgccatcattgcgataaaggaaaggctatcgttcaagatgcctctgccgacagtggtcccaaagatggacccccacccacgaggagcatcgtggaaaaagaagacgttccaaccacgtcttcaaagcaagtggattgatgtgatatctccactgacgtaagggatgacgcacaatcccactagactctatcagtgatagagtgtatataagactctatcagtgatagagtgaactctatcagtgatagagttgtacttatttttacaacaattaccaacaacaacaaacaacaaacaacattacaattactatttacaattacagtcgacccgggatccatggcctcctccgaggacgtcatcaaggagttcatgcgcttcaaggtgcgcatggagggctccgtgaacggccacgagttcgagatcgagggcgagggcgagggccgcccctacgagggcacccagaccgccaagctgaaggtgaccaagggcggccccctgcccttcgcctgggacatcctgtccccccagttccagtacggctccaaggtgtacgtgaagcaccccgccgacatccccgactacaagaagctgtccttccccgagggcttcaagtgggagcgcgtgatgaacttcgaggacggcggcgtggtgaccgtgacccaggactcctccctgcaggacggctccttcatctacaaggtgaagttcatcggcgtgaacttcccctccgacggccccgtaatgcagaagaagactatgggctgggaggcctccaccgagcgcctgtacccccgcgacggcgtgctgaagggcgagatccacaaggccctgaagctgaaggacggcggccactacctggtggagttcaagtccatctacatggccaagaagcccgtgcagctgcccggctactactacgtggactccaagctggacatcacctcccacaacgaggactacaccatcgtggagcagtacgagcgcgccgagggccgccaccacctgttcctgtagcggccccgctgaaatcaccagtctctctctacaaatctatctctctctataataatgtgtgagtagttcccagataagggaattagggttcttatagggtttcgctcatgtgttgagcatataagaaacccttagtatgtatttgtatttgtaaaatacttctatcaataaaatttctaattcctaaaaccaaaatccagtggcgagctcgagggtttacttattttgtgggtatctatacttttattagatttttaatcaggctcctgatttctttttatttcgattgaattcctgaacttgtattattcagtagatcgaataaattataaaaagataaaatcataaaataatattttatcctatcaatcatattaaagcaatgaatatgtaaaattaatcttatctttattttaaaaaatcatataggtttagtatttttttaaaaataaagataggattagttttactattcactgcttattacttttaaaaaaatcataaaggtttagtatttttttaaaataaatataggaatagttttactattcactgctttaatagaaaaatagtttaaaatttaagatagttttaatcccagcatttgccacgtttgaacgtgagccgaaacgatgtcgttacattatcttaacctagctgaaacgatgtcgtcataatatcgccaaatgccaactggactacgtcgaacccacaaatcccacaaagcgcgtgaaatcaaatcgctcaaaccacaaaaaagaacaacgcgtttgttacacgctcaatcccacgcgagtagagcacagtaaccttcaaataagcgaatggggcataatcagaaatccgaaataaacctaggggcattatcggaaatgaaaagtagctcactcaatataaaaatctaggaaccctagttttcgttatcactctgtgctccctcgctctatttctcagtctctgtgtttgcggctgaggattccgaacgagtgaccttcttcgtttctcgcaaaggtaacagcctctgctcttgtctcttcgattcgatctatgcctgtctcttatttacgatgatgtttcttcggttatgtttttttatttatgctttatgctgttgatgttcggttgtttgtttcgctttgtttttgtggttcagttttttaggattcttttggtttttgaatcgattaatcggaagagattttcgagttatttggtgtgttggaggtgaatcttttttttgaggtcatagatctgttgtatttgtgttataaacatgcgactttgtatgattttttacgaggttatgatgttctggttgttttattatgaatctgttgagacagaaccatgatttttgttgatgttcgtttacactattaaaggtttgttttaacaggattaaaagttttttaagcatgttgaaggagtcttgtagatatgtaaccgtcgatagtttttttgtgggtttgttcacatgttatcaagcttaatcttttactatgtatgcgaccatatctggatccagcaaaggcgattttttaattccttgtgaaacttttgtaatatgaagttgaaattttgttattggtaaactataaatgtgtgaagttggagtatacctttaccttcttatttggctttgtgatagtttaatttatatgtattttgagttctgacttgtatttctttgaattgattctagtttaagtaatccatggccagactcgacaagagcaaggtgatcaacagcgcactggagctgctgaacgaggtcggaatcgaaggcctcacaacccgtaagctcgcccagaagctcggggttgagcagcctacattgtactggcacgtcaagaacaagcgagctctgctagacgctatggccattgagatgctcgataggcacgctacccacgtgtgccctttggaaggggaaagctggcaagacttcttgaggaacaacgctaagatcatgagatgtgctttgctcagtcaccgtgatggagccaaggtctgtctaggtacgggcttcacggagcaacagtatgaaactgctgagaacagccttgccttcctgtgccaacaaggtttctcccttgagcatgccctctacgcaatgcaagctgctgggatcttcactctgggttgcgtcttgctggatcaagagctgcaagtcgctaaggaggagagggaaacacctactactgatagtatgccgccactggttcgacaagctctggaactcaacgatcaccaaggtgcagagccagccttcctgttcggccttgaactgatcatatgcggattggagaagcagctgaagtgtgaaagtgggtcttaatgatagctgcaggcatgccgctgaaatcaccagtctctctctacaaatctatctctctctataataatgtgtgagtagttcccagataagggaattagggttcttatagggtttcgctcatgtgttgagcatataagaaacccttagtatgtatttgtatttgtaaaatacttctatcaataaaatttctaattcctaaaaccaaaatccagtggcgagctcgagcccgggcacccagctttcttgtacaaagtggttcgataaacactagtaacggccgccagtgtgctggaattcgcccttcccaagctttgctctagatcaaactcacatccaaacataacatggatatcttccttaccaatcatactaattattttgggttaaatattaatcattatttttaagatattaattaagaaattaaaagattttttaaaaaaatgtataaaattatattattcatgatttttcatacatttgattttgataataaatatattttttttaatttcttaaaaaatgttgcaagacacttattagacatagtcttgttctgtttacaaaagcattcatcatttaatacattaaaaaatatttaatactaacagtagaatcttcttgtgagtggtgtgggagtaggcaacctggcattgaaacgagagaaagagagtcagaaccagaagacaaataaaaagtatgcaacaaacaaatcaaaatcaaagggcaaaggctggggttggctcaattggttgctacattcaattttcaactcagtcaacggttgagattcactctgacttccccaatctaagccgcggatgcaaacggttgaatctaacccacaatccaatctcgttacttaggggcttttccgtcattaactcacccctgccacccggtttccctataaattggaactcaatgctcccctctaaactcgtatcgcttcagagttgagaccaagacacactcgttcatatatctctctgctcttctcttctcttctacctctcaaggtacttttcttctccctctaccaaatcctagattccgtggttcaatttcggatcttgcacttctggtttgctttgccttgctttttcctcaactgggtccatctaggatccatgtgaaactctactctttctttaatatctgcggaatacgcgtttgactttcagatctagtcgaaatcatttcataattgcctttctttcttttagcttatgagaaataaaatcactttttttttatttcaaaataaaccttgggccttgtgctgactgagatggggtttggtgattacagaattttagcgaattttgtaattgtacttgtttgtctgtagttttgttttgttttcttgtttctcatacattccttaggcttcaattttattcgagtataggtcacaataggaattcaaactttgagcaggggaattaatcccttccttcaaatccagtttgtttgtatatatgtttaaaaaatgaaacttttgctttaaattctattataactttttttatggctgaaatttttgcatgtgtctttgctctctgttgtaaatttactgtttaggtactaactctaggcttgttgtgcagtttttgaagtataacaacagaagttcctattccgaagttcctattctctagaaagtataggaacttccaccacacaacacaatggcggccaccgcttccagaaccacccgattctcttcttcctcttcacaccccaccttccccaaacgcattactagatccaccctccctctctctcatcaaaccctcaccaaacccaaccacgctctcaaaatcaaatgttccatctccaaaccccccacggcggcgcccttcaccaaggaagcgccgaccacggagcccttcgtgtcacggttcgcctccggcgaacctcgcaagggcgcggacatccttgtggaggcgctggagaggcagggcgtgacgacggtgttcgcgtaccccggcggtgcgtcgatggagatccaccaggcgctcacgcgctccgccgccatccgcaacgtgctcccgcgccacgagcagggcggcgtcttcgccgccgaaggctacgcgcgttcctccggcctccccggcgtctgcattgccacctccggccccggcgccaccaacctcgtgagcggcctcgccgacgctttaatggacagcgtcccagtcgtcgccatcaccggccaggtcgcccgccggatgatcggcaccgacgccttccaagaaaccccgatcgtggaggtgagcagatccatcacgaagcacaactacctcatcctcgacgtcgacgacatcccccgcgtcgtcgccgaggctttcttcgtcgccacctccggccgccccggtccggtcctcatcgacattcccaaagacgttcagcagcaactcgccgtgcctaattgggacgagcccgttaacctccccggttacctcgccaggctgcccaggccccccgccgaggcccaattggaacacattgtcagactcatcatggaggcccaaaagcccgttctctacgtcggcggtggcagtttgaattccagtgctgaattgaggcgctttgttgaactcactggtattcccgttgctagcactttaatgggtcttggaacttttcctattggtgatgaatattcccttcagatgctgggtatgcatggtactgtttatgctaactatgctgttgacaatagtgatttgttgcttgcctttggggtaaggtttgatgaccgtgttactgggaagcttgaggcttttgctagtagggctaagattgttcacattgatattgattctgccgagattgggaagaacaagcaggcgcacgtgtcggtttgcgcggatttgaagttggccttgaagggaattaatatgattttggaggagaaaggagtggagggtaagtttgatcttggaggttggagagaagagattaatgtgcagaaacacaagtttccattgggttacaagacattccaggacgcgatttctccgcagcatgctatcgaggttcttgatgagttgactaatggagatgctattgttagtactggggttgggcagcatcaaatgtgggctgcgcagttttacaagtacaagagaccgaggcagtggttgacctcagggggtcttggagccatgggttttggattgcctgcggctattggtgctgctgttgctaaccctggggctgttgtggttgacattgatggggatggtagtttcatcatgaatgttcaggagttggccactataagagtggagaatctcccagttaagatattgttgttgaacaatcagcatttgggtatggtggttcagttggaggataggttctacaagtccaatagagctcacacctatcttggagatccgtctagcgagagcgagatattcccaaacatgctcaagtttgctgatgcttgtgggataccggcagcgcgagtgacgaagaaggaagagcttagagcggcaattcagagaatgttggacacccctggcccctaccttcttgatgtcattgtgccccatcaggagcatgtgttgccgatgattcccagtaatggatccttcaaggatgtgataactgagggtgatggtagaacgaggtactgattgcctagaccaaatgttccttgatgcttgttttgtacaatatatataagataatgctgtcctagttgcaggatttggcctgtggtgagcatcatagtctgtagtagttttggtagcaagacattttattttccttttatttaacttactacatgcagtagcatctatctatctctgtagtctgatatctcctgttgtctgtattgtgccgttggattttttgctgtagtgagactgaaaatgatgtgctagtaataatatttctgttagaaatctaagtagagaatctgttgaagaagtcaaaagctaatggaatcaggttacatattcaatgtttttctttttttagcggttggtagacgtgtagattcaacttctcttggagctcacctaggcaatcagtaaaatgcatattccttttttaacttgccatttatttacttttagtggaaattgtgaccaatttgttcatgtagaacggatttggaccattgcgtccacaaaacgtctcttttgctcgatcttcacaaagcgataccgaaatccagagatagttttcaaaagtcagaaatggcaaagttataaatagtaaaacagaatagatgctgtaatcgacttcaataacaagtggcatcacgtttctagttctagacccatcagctgggccggcccagctgatgatcccggtgaagttcctattccgaagttcctattctccagaaagtataggaacttcactagagcttgcggccgcgcatgctgacttaatcagctaacgccactcgagggggggcccggtaccgg

SEQ ID NO: 842 - DNA, 8131 bp, Artificial sequence
  PHP37587A
cgcgccggtacccgggtaccgagctcactagacgcggtgaaattacctaattaacaccggtgtttatcaaacaagtttgtacaaaaaagcaggctccggccagaatggcccggaccgggttaccgaattctagaaatccgtcaacatggtggagcacgacactctcgtctactccaagaatatcaaagatacagtctcagaagaccaaagggctattgagacttttcaacaaagggtaatatcgggaaacctcctcggattccattgcccagctatctgtcacttcatcaaaaggacagtagaaaaggaaggtggcacctacaaatgccatcattgcgataaaggaaaggctatcgttcaagatgcctctgccgacagtggtcccaaagatggacccccacccacgaggagcatcgtggaaaaagaagacgttccaaccacgtcttcaaagcaagtggattgatgtgatatctccactgacgtaagggatgacgcacaatcccactagactctatcagtgatagagtgtatataagactctatcagtgatagagtgaactctatcagtgatagagttgtacttatttttacaacaattaccaacaacaacaaacaacaaacaacattacaattactatttacaattacagtcgacccgggatccatggcctcctccgaggacgtcatcaaggagttcatgcgcttcaaggtgcgcatggagggctccgtgaacggccacgagttcgagatcgagggcgagggcgagggccgcccctacgagggcacccagaccgccaagctgaaggtgaccaagggcggccccctgcccttcgcctgggacatcctgtccccccagttccagtacggctccaaggtgtacgtgaagcaccccgccgacatccccgactacaagaagctgtccttccccgagggcttcaagtgggagcgcgtgatgaacttcgaggacggcggcgtggtgaccgtgacccaggactcctccctgcaggacggctccttcatctacaaggtgaagttcatcggcgtgaacttcccctccgacggccccgtaatgcagaagaagactatgggctgggaggcctccaccgagcgcctgtacccccgcgacggcgtgctgaagggcgagatccacaaggccctgaagctgaaggacggcggccactacctggtggagttcaagtccatctacatggccaagaagcccgtgcagctgcccggctactactacgtggactccaagctggacatcacctcccacaacgaggactacaccatcgtggagcagtacgagcgcgccgagggccgccaccacctgttcctgtagcggccccgctgaaatcaccagtctctctctacaaatctatctctctctataataatgtgtgagtagttcccagataagggaattagggttcttatagggtttcgctcatgtgttgagcatataagaaacccttagtatgtatttgtatttgtaaaatacttctatcaataaaatttctaattcctaaaaccaaaatccagtggcgagctcgagggtttacttattttgtgggtatctatacttttattagatttttaatcaggctcctgatttctttttatttcgattgaattcctgaacttgtattattcagtagatcgaataaattataaaaagataaaatcataaaataatattttatcctatcaatcatattaaagcaatgaatatgtaaaattaatcttatctttattttaaaaaatcatataggtttagtatttttttaaaaataaagataggattagttttactattcactgcttattacttttaaaaaaatcataaaggtttagtatttttttaaaataaatataggaatagttttactattcactgctttaatagaaaaatagtttaaaatttaagatagttttaatcccagcatttgccacgtttgaacgtgagccgaaacgatgtcgttacattatcttaacctagctgaaacgatgtcgtcataatatcgccaaatgccaactggactacgtcgaacccacaaatcccacaaagcgcgtgaaatcaaatcgctcaaaccacaaaaaagaacaacgcgtttgttacacgctcaatcccacgcgagtagagcacagtaaccttcaaataagcgaatggggcataatcagaaatccgaaataaacctaggggcattatcggaaatgaaaagtagctcactcaatataaaaatctaggaaccctagttttcgttatcactctgtgctccctcgctctatttctcagtctctgtgtttgcggctgaggattccgaacgagtgaccttcttcgtttctcgcaaaggtaacagcctctgctcttgtctcttcgattcgatctatgcctgtctcttatttacgatgatgtttcttcggttatgtttttttatttatgctttatgctgttgatgttcggttgtttgtttcgctttgtttttgtggttcagttttttaggattcttttggtttttgaatcgattaatcggaagagattttcgagttatttggtgtgttggaggtgaatcttttttttgaggtcatagatctgttgtatttgtgttataaacatgcgactttgtatgattttttacgaggttatgatgttctggttgttttattatgaatctgttgagacagaaccatgatttttgttgatgttcgtttacactattaaaggtttgttttaacaggattaaaagttttttaagcatgttgaaggagtcttgtagatatgtaaccgtcgatagtttttttgtgggtttgttcacatgttatcaagcttaatcttttactatgtatgcgaccatatctggatccagcaaaggcgattttttaattccttgtgaaacttttgtaatatgaagttgaaattttgttattggtaaactataaatgtgtgaagttggagtatacctttaccttcttatttggctttgtgatagtttaatttatatgtattttgagttctgacttgtatttctttgaattgattctagtttaagtaatccatggccagactcgacaagagcaaggtgatcaacagcgcactggagctgctgaacgaggtcggaatcgaaggcctcacaacccgtaagctcgcccagaagctcggggttgagcagcctacattgtactggcacgtcaagaacaagcgagctctgctagacgctatggccattgagatgctcgataggcacgctacccactactgccctttggaaggggaaagctggcaagacttcttgaggaacaacgctaagtccatgagatgtgctttgctcagtcaccgtgatggagccaaggtctgtctaggtacgggcttcacggagcaacagtatgaaactgctgagaacagccttgccttcctgtgccaacaaggtttctcccttgagaacgccctctacgcaatgcaagctgttgggatctacactctgggttgcgtcttgctggatcaagagctgcaagtcgctaaggaggagagggaaacacctactactgatagtatgccgccactggttcgacaagctctggaactcaaggatcaccaaggtgcagagccagccttcctgttcggccttgaactgatcatatgcggattggagaagcagctgaagtgtgaaagtgggtcttaatgatagctgcaggcatgccgctgaaatcaccagtctctctctacaaatctatctctctctataataatgtgtgagtagttcccagataagggaattagggttcttatagggtttcgctcatgtgttgagcatataagaaacccttagtatgtatttgtatttgtaaaatacttctatcaataaaatttctaattcctaaaaccaaaatccagtggcgagctcgagcccgggcacccagctttcttgtacaaagtggttcgataaacactagtaacggccgccagtgtgctggaattcgcccttcccaagctttgctctagatcaaactcacatccaaacataacatggatatcttccttaccaatcatactaattattttgggttaaatattaatcattatttttaagatattaattaagaaattaaaagattttttaaaaaaatgtataaaattatattattcatgatttttcatacatttgattttgataataaatatattttttttaatttcttaaaaaatgttgcaagacacttattagacatagtcttgttctgtttacaaaagcattcatcatttaatacattaaaaaatatttaatactaacagtagaatcttcttgtgagtggtgtgggagtaggcaacctggcattgaaacgagagaaagagagtcagaaccagaagacaaataaaaagtatgcaacaaacaaatcaaaatcaaagggcaaaggctggggttggctcaattggttgctacattcaattttcaactcagtcaacggttgagattcactctgacttccccaatctaagccgcggatgcaaacggttgaatctaacccacaatccaatctcgttacttaggggcttttccgtcattaactcacccctgccacccggtttccctataaattggaactcaatgctcccctctaaactcgtatcgcttcagagttgagaccaagacacactcgttcatatatctctctgctcttctcttctcttctacctctcaaggtacttttcttctccctctaccaaatcctagattccgtggttcaatttcggatcttgcacttctggtttgctttgccttgctttttcctcaactgggtccatctaggatccatgtgaaactctactctttctttaatatctgcggaatacgcgtttgactttcagatctagtcgaaatcatttcataattgcctttctttcttttagcttatgagaaataaaatcactttttttttatttcaaaataaaccttgggccttgtgctgactgagatggggtttggtgattacagaattttagcgaattttgtaattgtacttgtttgtctgtagttttgttttgttttcttgtttctcatacattccttaggcttcaattttattcgagtataggtcacaataggaattcaaactttgagcaggggaattaatcccttccttcaaatccagtttgtttgtatatatgtttaaaaaatgaaacttttgctttaaattctattataactttttttatggctgaaatttttgcatgtgtctttgctctctgttgtaaatttactgtttaggtactaactctaggcttgttgtgcagtttttgaagtataacaacagaagttcctattccgaagttcctattctctagaaagtataggaacttccaccacacaacacaatggcggccaccgcttccagaaccacccgattctcttcttcctcttcacaccccaccttccccaaacgcattactagatccaccctccctctctctcatcaaaccctcaccaaacccaaccacgctctcaaaatcaaatgttccatctccaaaccccccacggcggcgcccttcaccaaggaagcgccgaccacggagcccttcgtgtcacggttcgcctccggcgaacctcgcaagggcgcggacatccttgtggaggcgctggagaggcagggcgtgacgacggtgttcgcgtaccccggcggtgcgtcgatggagatccaccaggcgctcacgcgctccgccgccatccgcaacgtgctcccgcgccacgagcagggcggcgtcttcgccgccgaaggctacgcgcgttcctccggcctccccggcgtctgcattgccacctccggccccggcgccaccaacctcgtgagcggcctcgccgacgctttaatggacagcgtcccagtcgtcgccatcaccggccaggtcgcccgccggatgatcggcaccgacgccttccaagaaaccccgatcgtggaggtgagcagatccatcacgaagcacaactacctcatcctcgacgtcgacgacatcccccgcgtcgtcgccgaggctttcttcgtcgccacctccggccgccccggtccggtcctcatcgacattcccaaagacgttcagcagcaactcgccgtgcctaattgggacgagcccgttaacctccccggttacctcgccaggctgcccaggccccccgccgaggcccaattggaacacattgtcagactcatcatggaggcccaaaagcccgttctctacgtcggcggtggcagtttgaattccagtgctgaattgaggcgctttgttgaactcactggtattcccgttgctagcactttaatgggtcttggaacttttcctattggtgatgaatattcccttcagatgctgggtatgcatggtactgtttatgctaactatgctgttgacaatagtgatttgttgcttgcctttggggtaaggtttgatgaccgtgttactgggaagcttgaggcttttgctagtagggctaagattgttcacattgatattgattctgccgagattgggaagaacaagcaggcgcacgtgtcggtttgcgcggatttgaagttggccttgaagggaattaatatgattttggaggagaaaggagtggagggtaagtttgatcttggaggttggagagaagagattaatgtgcagaaacacaagtttccattgggttacaagacattccaggacgcgatttctccgcagcatgctatcgaggttcttgatgagttgactaatggagatgctattgttagtactggggttgggcagcatcaaatgtgggctgcgcagttttacaagtacaagagaccgaggcagtggttgacctcagggggtcttggagccatgggttttggattgcctgcggctattggtgctgctgttgctaaccctggggctgttgtggttgacattgatggggatggtagtttcatcatgaatgttcaggagttggccactataagagtggagaatctcccagttaagatattgttgttgaacaatcagcatttgggtatggtggttcagttggaggataggttctacaagtccaatagagctcacacctatcttggagatccgtctagcgagagcgagatattcccaaacatgctcaagtttgctgatgcttgtgggataccggcagcgcgagtgacgaagaaggaagagcttagagcggcaattcagagaatgttggacacccctggcccctaccttcttgatgtcattgtgccccatcaggagcatgtgttgccgatgattcccagtaatggatccttcaaggatgtgataactgagggtgatggtagaacgaggtactgattgcctagaccaaatgttccttgatgcttgttttgtacaatatatataagataatgctgtcctagttgcaggatttggcctgtggtgagcatcatagtctgtagtagttttggtagcaagacattttattttccttttatttaacttactacatgcagtagcatctatctatctctgtagtctgatatctcctgttgtctgtattgtgccgttggattttttgctgtagtgagactgaaaatgatgtgctagtaataatatttctgttagaaatctaagtagagaatctgttgaagaagtcaaaagctaatggaatcaggttacatattcaatgtttttctttttttagcggttggtagacgtgtagattcaacttctcttggagctcacctaggcaatcagtaaaatgcatattccttttttaacttgccatttatttacttttagtggaaattgtgaccaatttgttcatgtagaacggatttggaccattgcgtccacaaaacgtctcttttgctcgatcttcacaaagcgataccgaaatccagagatagttttcaaaagtcagaaatggcaaagttataaatagtaaaacagaatagatgctgtaatcgacttcaataacaagtggcatcacgtttctagttctagacccatcagctgggccggcccagctgatgatcccggtgaagttcctattccgaagttcctattctccagaaagtataggaacttcactagagcttgcggccgcgcatgctgacttaatcagctaacgccactcgagggggggcccggtaccgg

SEQ ID NO: 843 - DNA, 8131 bp, Artificial sequence
  PHP37588A
cgcgccggtacccgggtaccgagctcactagacgcggtgaaattacctaattaacaccggtgtttatcaaacaagtttgtacaaaaaagcaggctccggccagaatggcccggaccgggttaccgaattctagaaatccgtcaacatggtggagcacgacactctcgtctactccaagaatatcaaagatacagtctcagaagaccaaagggctattgagacttttcaacaaagggtaatatcgggaaacctcctcggattccattgcccagctatctgtcacttcatcaaaaggacagtagaaaaggaaggtggcacctacaaatgccatcattgcgataaaggaaaggctatcgttcaagatgcctctgccgacagtggtcccaaagatggacccccacccacgaggagcatcgtggaaaaagaagacgttccaaccacgtcttcaaagcaagtggattgatgtgatatctccactgacgtaagggatgacgcacaatcccactagactctatcagtgatagagtgtatataagactctatcagtgatagagtgaactctatcagtgatagagttgtacttatttttacaacaattaccaacaacaacaaacaacaaacaacattacaattactatttacaattacagtcgacccgggatccatggcctcctccgaggacgtcatcaaggagttcatgcgcttcaaggtgcgcatggagggctccgtgaacggccacgagttcgagatcgagggcgagggcgagggccgcccctacgagggcacccagaccgccaagctgaaggtgaccaagggcggccccctgcccttcgcctgggacatcctgtccccccagttccagtacggctccaaggtgtacgtgaagcaccccgccgacatccccgactacaagaagctgtccttccccgagggcttcaagtgggagcgcgtgatgaacttcgaggacggcggcgtggtgaccgtgacccaggactcctccctgcaggacggctccttcatctacaaggtgaagttcatcggcgtgaacttcccctccgacggccccgtaatgcagaagaagactatgggctgggaggcctccaccgagcgcctgtacccccgcgacggcgtgctgaagggcgagatccacaaggccctgaagctgaaggacggcggccactacctggtggagttcaagtccatctacatggccaagaagcccgtgcagctgcccggctactactacgtggactccaagctggacatcacctcccacaacgaggactacaccatcgtggagcagtacgagcgcgccgagggccgccaccacctgttcctgtagcggccccgctgaaatcaccagtctctctctacaaatctatctctctctataataatgtgtgagtagttcccagataagggaattagggttcttatagggtttcgctcatgtgttgagcatataagaaacccttagtatgtatttgtatttgtaaaatacttctatcaataaaatttctaattcctaaaaccaaaatccagtggcgagctcgagggtttacttattttgtgggtatctatacttttattagatttttaatcaggctcctgatttctttttatttcgattgaattcctgaacttgtattattcagtagatcgaataaattataaaaagataaaatcataaaataatattttatcctatcaatcatattaaagcaatgaatatgtaaaattaatcttatctttattttaaaaaatcatataggtttagtatttttttaaaaataaagataggattagttttactattcactgcttattacttttaaaaaaatcataaaggtttagtatttttttaaaataaatataggaatagttttactattcactgctttaatagaaaaatagtttaaaatttaagatagttttaatcccagcatttgccacgtttgaacgtgagccgaaacgatgtcgttacattatcttaacctagctgaaacgatgtcgtcataatatcgccaaatgccaactggactacgtcgaacccacaaatcccacaaagcgcgtgaaatcaaatcgctcaaaccacaaaaaagaacaacgcgtttgttacacgctcaatcccacgcgagtagagcacagtaaccttcaaataagcgaatggggcataatcagaaatccgaaataaacctaggggcattatcggaaatgaaaagtagctcactcaatataaaaatctaggaaccctagttttcgttatcactctgtgctccctcgctctatttctcagtctctgtgtttgcggctgaggattccgaacgagtgaccttcttcgtttctcgcaaaggtaacagcctctgctcttgtctcttcgattcgatctatgcctgtctcttatttacgatgatgtttcttcggttatgtttttttatttatgctttatgctgttgatgttcggttgtttgtttcgctttgtttttgtggttcagttttttaggattcttttggtttttgaatcgattaatcggaagagattttcgagttatttggtgtgttggaggtgaatcttttttttgaggtcatagatctgttgtatttgtgttataaacatgcgactttgtatgattttttacgaggttatgatgttctggttgttttattatgaatctgttgagacagaaccatgatttttgttgatgttcgtttacactattaaaggtttgttttaacaggattaaaagttttttaagcatgttgaaggagtcttgtagatatgtaaccgtcgatagtttttttgtgggtttgttcacatgttatcaagcttaatcttttactatgtatgcgaccatatctggatccagcaaaggcgattttttaattccttgtgaaacttttgtaatatgaagttgaaattttgttattggtaaactataaatgtgtgaagttggagtatacctttaccttcttatttggctttgtgatagtttaatttatatgtattttgagttctgacttgtatttctttgaattgattctagtttaagtaatccatggccagactcgacaagagcaaggtgatcaacagcgcactggagctgctgaacgaggtcggaatcgaaggcctcacaacccgtaagctcgcccagaagctcggggttgagcagcctacattgtactggcacgtcaagaacaagcgagctctgctagacgctatggccattgagatgctcgataggcacgctacccactactgccctttggaaggggaaagctggcaagacttcttgaggaacaacgctaagtccatgagatgtgctttgctcagtcaccgtgatggagccaaggtctgtctaggtacgggcttcacggagcaacagtatgaaactgctgagaacagcatggccttcctgtgccaacaaggtttctcccttgagaacgccctctacgcaatgcaagctgttgggatctacactctgggttgcgtcttgctggatcaagagctgcaagtcgctaaggaggagagggaaacacctactactgatagtatgccgccactggttcgacaagctctggaactcaaggatcaccaaggtgcagagccagccttcctgttcggccttgaactgatcatatgcggattggagaagcagctgaagtgtgaaagtgggtcttaatgatagctgcaggcatgccgctgaaatcaccagtctctctctacaaatctatctctctctataataatgtgtgagtagttcccagataagggaattagggttcttatagggtttcgctcatgtgttgagcatataagaaacccttagtatgtatttgtatttgtaaaatacttctatcaataaaatttctaattcctaaaaccaaaatccagtggcgagctcgagcccgggcacccagctttcttgtacaaagtggttcgataaacactagtaacggccgccagtgtgctggaattcgcccttcccaagctttgctctagatcaaactcacatccaaacataacatggatatcttccttaccaatcatactaattattttgggttaaatattaatcattatttttaagatattaattaagaaattaaaagattttttaaaaaaatgtataaaattatattattcatgatttttcatacatttgattttgataataaatatattttttttaatttcttaaaaaatgttgcaagacacttattagacatagtcttgttctgtttacaaaagcattcatcatttaatacattaaaaaatatttaatactaacagtagaatcttcttgtgagtggtgtgggagtaggcaacctggcattgaaacgagagaaagagagtcagaaccagaagacaaataaaaagtatgcaacaaacaaatcaaaatcaaagggcaaaggctggggttggctcaattggttgctacattcaattttcaactcagtcaacggttgagattcactctgacttccccaatctaagccgcggatgcaaacggttgaatctaacccacaatccaatctcgttacttaggggcttttccgtcattaactcacccctgccacccggtttccctataaattggaactcaatgctcccctctaaactcgtatcgcttcagagttgagaccaagacacactcgttcatatatctctctgctcttctcttctcttctacctctcaaggtacttttcttctccctctaccaaatcctagattccgtggttcaatttcggatcttgcacttctggtttgctttgccttgctttttcctcaactgggtccatctaggatccatgtgaaactctactctttctttaatatctgcggaatacgcgtttgactttcagatctagtcgaaatcatttcataattgcctttctttcttttagcttatgagaaataaaatcactttttttttatttcaaaataaaccttgggccttgtgctgactgagatggggtttggtgattacagaattttagcgaattttgtaattgtacttgtttgtctgtagttttgttttgttttcttgtttctcatacattccttaggcttcaattttattcgagtataggtcacaataggaattcaaactttgagcaggggaattaatcccttccttcaaatccagtttgtttgtatatatgtttaaaaaatgaaacttttgctttaaattctattataactttttttatggctgaaatttttgcatgtgtctttgctctctgttgtaaatttactgtttaggtactaactctaggcttgttgtgcagtttttgaagtataacaacagaagttcctattccgaagttcctattctctagaaagtataggaacttccaccacacaacacaatggcggccaccgcttccagaaccacccgattctcttcttcctcttcacaccccaccttccccaaacgcattactagatccaccctccctctctctcatcaaaccctcaccaaacccaaccacgctctcaaaatcaaatgttccatctccaaaccccccacggcggcgcccttcaccaaggaagcgccgaccacggagcccttcgtgtcacggttcgcctccggcgaacctcgcaagggcgcggacatccttgtggaggcgctggagaggcagggcgtgacgacggtgttcgcgtaccccggcggtgcgtcgatggagatccaccaggcgctcacgcgctccgccgccatccgcaacgtgctcccgcgccacgagcagggcggcgtcttcgccgccgaaggctacgcgcgttcctccggcctccccggcgtctgcattgccacctccggccccggcgccaccaacctcgtgagcggcctcgccgacgctttaatggacagcgtcccagtcgtcgccatcaccggccaggtcgcccgccggatgatcggcaccgacgccttccaagaaaccccgatcgtggaggtgagcagatccatcacgaagcacaactacctcatcctcgacgtcgacgacatcccccgcgtcgtcgccgaggctttcttcgtcgccacctccggccgccccggtccggtcctcatcgacattcccaaagacgttcagcagcaactcgccgtgcctaattgggacgagcccgttaacctccccggttacctcgccaggctgcccaggccccccgccgaggcccaattggaacacattgtcagactcatcatggaggcccaaaagcccgttctctacgtcggcggtggcagtttgaattccagtgctgaattgaggcgctttgttgaactcactggtattcccgttgctagcactttaatgggtcttggaacttttcctattggtgatgaatattcccttcagatgctgggtatgcatggtactgtttatgctaactatgctgttgacaatagtgatttgttgcttgcctttggggtaaggtttgatgaccgtgttactgggaagcttgaggcttttgctagtagggctaagattgttcacattgatattgattctgccgagattgggaagaacaagcaggcgcacgtgtcggtttgcgcggatttgaagttggccttgaagggaattaatatgattttggaggagaaaggagtggagggtaagtttgatcttggaggttggagagaagagattaatgtgcagaaacacaagtttccattgggttacaagacattccaggacgcgatttctccgcagcatgctatcgaggttcttgatgagttgactaatggagatgctattgttagtactggggttgggcagcatcaaatgtgggctgcgcagttttacaagtacaagagaccgaggcagtggttgacctcagggggtcttggagccatgggttttggattgcctgcggctattggtgctgctgttgctaaccctggggctgttgtggttgacattgatggggatggtagtttcatcatgaatgttcaggagttggccactataagagtggagaatctcccagttaagatattgttgttgaacaatcagcatttgggtatggtggttcagttggaggataggttctacaagtccaatagagctcacacctatcttggagatccgtctagcgagagcgagatattcccaaacatgctcaagtttgctgatgcttgtgggataccggcagcgcgagtgacgaagaaggaagagcttagagcggcaattcagagaatgttggacacccctggcccctaccttcttgatgtcattgtgccccatcaggagcatgtgttgccgatgattcccagtaatggatccttcaaggatgtgataactgagggtgatggtagaacgaggtactgattgcctagaccaaatgttccttgatgcttgttttgtacaatatatataagataatgctgtcctagttgcaggatttggcctgtggtgagcatcatagtctgtagtagttttggtagcaagacattttattttccttttatttaacttactacatgcagtagcatctatctatctctgtagtctgatatctcctgttgtctgtattgtgccgttggattttttgctgtagtgagactgaaaatgatgtgctagtaataatatttctgttagaaatctaagtagagaatctgttgaagaagtcaaaagctaatggaatcaggttacatattcaatgtttttctttttttagcggttggtagacgtgtagattcaacttctcttggagctcacctaggcaatcagtaaaatgcatattccttttttaacttgccatttatttacttttagtggaaattgtgaccaatttgttcatgtagaacggatttggaccattgcgtccacaaaacgtctcttttgctcgatcttcacaaagcgataccgaaatccagagatagttttcaaaagtcagaaatggcaaagttataaatagtaaaacagaatagatgctgtaatcgacttcaataacaagtggcatcacgtttctagttctagacccatcagctgggccggcccagctgatgatcccggtgaagttcctattccgaagttcctattctccagaaagtataggaacttcactagagcttgcggccgcgcatgctgacttaatcagctaacgccactcgagggggggcccggtaccgg

SEQ ID NO: 844 - DNA, 8131 bp, Artificial sequence
  PHP37589A
cgcgccggtacccgggtaccgagctcactagacgcggtgaaattacctaattaacaccggtgtttatcaaacaagtttgtacaaaaaagcaggctccggccagaatggcccggaccgggttaccgaattctagaaatccgtcaacatggtggagcacgacactctcgtctactccaagaatatcaaagatacagtctcagaagaccaaagggctattgagacttttcaacaaagggtaatatcgggaaacctcctcggattccattgcccagctatctgtcacttcatcaaaaggacagtagaaaaggaaggtggcacctacaaatgccatcattgcgataaaggaaaggctatcgttcaagatgcctctgccgacagtggtcccaaagatggacccccacccacgaggagcatcgtggaaaaagaagacgttccaaccacgtcttcaaagcaagtggattgatgtgatatctccactgacgtaagggatgacgcacaatcccactagactctatcagtgatagagtgtatataagactctatcagtgatagagtgaactctatcagtgatagagttgtacttatttttacaacaattaccaacaacaacaaacaacaaacaacattacaattactatttacaattacagtcgacccgggatccatggcctcctccgaggacgtcatcaaggagttcatgcgcttcaaggtgcgcatggagggctccgtgaacggccacgagttcgagatcgagggcgagggcgagggccgcccctacgagggcacccagaccgccaagctgaaggtgaccaagggcggccccctgcccttcgcctgggacatcctgtccccccagttccagtacggctccaaggtgtacgtgaagcaccccgccgacatccccgactacaagaagctgtccttccccgagggcttcaagtgggagcgcgtgatgaacttcgaggacggcggcgtggtgaccgtgacccaggactcctccctgcaggacggctccttcatctacaaggtgaagttcatcggcgtgaacttcccctccgacggccccgtaatgcagaagaagactatgggctgggaggcctccaccgagcgcctgtacccccgcgacggcgtgctgaagggcgagatccacaaggccctgaagctgaaggacggcggccactacctggtggagttcaagtccatctacatggccaagaagcccgtgcagctgcccggctactactacgtggactccaagctggacatcacctcccacaacgaggactacaccatcgtggagcagtacgagcgcgccgagggccgccaccacctgttcctgtagcggccccgctgaaatcaccagtctctctctacaaatctatctctctctataataatgtgtgagtagttcccagataagggaattagggttcttatagggtttcgctcatgtgttgagcatataagaaacccttagtatgtatttgtatttgtaaaatacttctatcaataaaatttctaattcctaaaaccaaaatccagtggcgagctcgagggtttacttattttgtgggtatctatacttttattagatttttaatcaggctcctgatttctttttatttcgattgaattcctgaacttgtattattcagtagatcgaataaattataaaaagataaaatcataaaataatattttatcctatcaatcatattaaagcaatgaatatgtaaaattaatcttatctttattttaaaaaatcatataggtttagtatttttttaaaaataaagataggattagttttactattcactgcttattacttttaaaaaaatcataaaggtttagtatttttttaaaataaatataggaatagttttactattcactgctttaatagaaaaatagtttaaaatttaagatagttttaatcccagcatttgccacgtttgaacgtgagccgaaacgatgtcgttacattatcttaacctagctgaaacgatgtcgtcataatatcgccaaatgccaactggactacgtcgaacccacaaatcccacaaagcgcgtgaaatcaaatcgctcaaaccacaaaaaagaacaacgcgtttgttacacgctcaatcccacgcgagtagagcacagtaaccttcaaataagcgaatggggcataatcagaaatccgaaataaacctaggggcattatcggaaatgaaaagtagctcactcaatataaaaatctaggaaccctagttttcgttatcactctgtgctccctcgctctatttctcagtctctgtgtttgcggctgaggattccgaacgagtgaccttcttcgtttctcgcaaaggtaacagcctctgctcttgtctcttcgattcgatctatgcctgtctcttatttacgatgatgtttcttcggttatgtttttttatttatgctttatgctgttgatgttcggttgtttgtttcgctttgtttttgtggttcagttttttaggattcttttggtttttgaatcgattaatcggaagagattttcgagttatttggtgtgttggaggtgaatcttttttttgaggtcatagatctgttgtatttgtgttataaacatgcgactttgtatgattttttacgaggttatgatgttctggttgttttattatgaatctgttgagacagaaccatgatttttgttgatgttcgtttacactattaaaggtttgttttaacaggattaaaagttttttaagcatgttgaaggagtcttgtagatatgtaaccgtcgatagtttttttgtgggtttgttcacatgttatcaagcttaatcttttactatgtatgcgaccatatctggatccagcaaaggcgattttttaattccttgtgaaacttttgtaatatgaagttgaaattttgttattggtaaactataaatgtgtgaagttggagtatacctttaccttcttatttggctttgtgatagtttaatttatatgtattttgagttctgacttgtatttctttgaattgattctagtttaagtaatccatggccagactcgacaagagcaaggtgatcaacagcgcactggagctgctgaacgaggtcggaatcgaaggcctcacaacccgtaagctcgcccagaagctcggggttgagcagcctacattgtactggcacgtcaagaacaagcgagctctgctagacgctatggccattgagatgctcgataggcacgctacccactactgccctttggaaggggaaagctggcaagacttcttgaggaacaacgctaagtccatgagatgtgctttgctcagtcaccgtgatggagccaaggtctgtctaggtacgggcttcacggagcaacagtatgaaactgctgagaacagccttgccttcctgtgccaacaaggtttctcccttgagcatgccatgtacgcaatgcaagctgctgggatctacactctgggttgcgtcttgctggatcaagagctgcaagtcgctaaggaggagagggaaacacctactactgatagtatgccgccactggttcgacaagctctggaactcaaggatcaccaaggtgcagagccagccttcctgttcggccttgaactgatcatatgcggattggagaagcagctgaagtgtgaaagtgggtcttaatgatagctgcaggcatgccgctgaaatcaccagtctctctctacaaatctatctctctctataataatgtgtgagtagttcccagataagggaattagggttcttatagggtttcgctcatgtgttgagcatataagaaacccttagtatgtatttgtatttgtaaaatacttctatcaataaaatttctaattcctaaaaccaaaatccagtggcgagctcgagcccgggcacccagctttcttgtacaaagtggttcgataaacactagtaacggccgccagtgtgctggaattcgcccttcccaagctttgctctagatcaaactcacatccaaacataacatggatatcttccttaccaatcatactaattattttgggttaaatattaatcattatttttaagatattaattaagaaattaaaagattttttaaaaaaatgtataaaattatattattcatgatttttcatacatttgattttgataataaatatattttttttaatttcttaaaaaatgttgcaagacacttattagacatagtcttgttctgtttacaaaagcattcatcatttaatacattaaaaaatatttaatactaacagtagaatcttcttgtgagtggtgtgggagtaggcaacctggcattgaaacgagagaaagagagtcagaaccagaagacaaataaaaagtatgcaacaaacaaatcaaaatcaaagggcaaaggctggggttggctcaattggttgctacattcaattttcaactcagtcaacggttgagattcactctgacttccccaatctaagccgcggatgcaaacggttgaatctaacccacaatccaatctcgttacttaggggcttttccgtcattaactcacccctgccacccggtttccctataaattggaactcaatgctcccctctaaactcgtatcgcttcagagttgagaccaagacacactcgttcatatatctctctgctcttctcttctcttctacctctcaaggtacttttcttctccctctaccaaatcctagattccgtggttcaatttcggatcttgcacttctggtttgctttgccttgctttttcctcaactgggtccatctaggatccatgtgaaactctactctttctttaatatctgcggaatacgcgtttgactttcagatctagtcgaaatcatttcataattgcctttctttcttttagcttatgagaaataaaatcactttttttttatttcaaaataaaccttgggccttgtgctgactgagatggggtttggtgattacagaattttagcgaattttgtaattgtacttgtttgtctgtagttttgttttgttttcttgtttctcatacattccttaggcttcaattttattcgagtataggtcacaataggaattcaaactttgagcaggggaattaatcccttccttcaaatccagtttgtttgtatatatgtttaaaaaatgaaacttttgctttaaattctattataactttttttatggctgaaatttttgcatgtgtctttgctctctgttgtaaatttactgtttaggtactaactctaggcttgttgtgcagtttttgaagtataacaacagaagttcctattccgaagttcctattctctagaaagtataggaacttccaccacacaacacaatggcggccaccgcttccagaaccacccgattctcttcttcctcttcacaccccaccttccccaaacgcattactagatccaccctccctctctctcatcaaaccctcaccaaacccaaccacgctctcaaaatcaaatgttccatctccaaaccccccacggcggcgcccttcaccaaggaagcgccgaccacggagcccttcgtgtcacggttcgcctccggcgaacctcgcaagggcgcggacatccttgtggaggcgctggagaggcagggcgtgacgacggtgttcgcgtaccccggcggtgcgtcgatggagatccaccaggcgctcacgcgctccgccgccatccgcaacgtgctcccgcgccacgagcagggcggcgtcttcgccgccgaaggctacgcgcgttcctccggcctccccggcgtctgcattgccacctccggccccggcgccaccaacctcgtgagcggcctcgccgacgctttaatggacagcgtcccagtcgtcgccatcaccggccaggtcgcccgccggatgatcggcaccgacgccttccaagaaaccccgatcgtggaggtgagcagatccatcacgaagcacaactacctcatcctcgacgtcgacgacatcccccgcgtcgtcgccgaggctttcttcgtcgccacctccggccgccccggtccggtcctcatcgacattcccaaagacgttcagcagcaactcgccgtgcctaattgggacgagcccgttaacctccccggttacctcgccaggctgcccaggccccccgccgaggcccaattggaacacattgtcagactcatcatggaggcccaaaagcccgttctctacgtcggcggtggcagtttgaattccagtgctgaattgaggcgctttgttgaactcactggtattcccgttgctagcactttaatgggtcttggaacttttcctattggtgatgaatattcccttcagatgctgggtatgcatggtactgtttatgctaactatgctgttgacaatagtgatttgttgcttgcctttggggtaaggtttgatgaccgtgttactgggaagcttgaggcttttgctagtagggctaagattgttcacattgatattgattctgccgagattgggaagaacaagcaggcgcacgtgtcggtttgcgcggatttgaagttggccttgaagggaattaatatgattttggaggagaaaggagtggagggtaagtttgatcttggaggttggagagaagagattaatgtgcagaaacacaagtttccattgggttacaagacattccaggacgcgatttctccgcagcatgctatcgaggttcttgatgagttgactaatggagatgctattgttagtactggggttgggcagcatcaaatgtgggctgcgcagttttacaagtacaagagaccgaggcagtggttgacctcagggggtcttggagccatgggttttggattgcctgcggctattggtgctgctgttgctaaccctggggctgttgtggttgacattgatggggatggtagtttcatcatgaatgttcaggagttggccactataagagtggagaatctcccagttaagatattgttgttgaacaatcagcatttgggtatggtggttcagttggaggataggttctacaagtccaatagagctcacacctatcttggagatccgtctagcgagagcgagatattcccaaacatgctcaagtttgctgatgcttgtgggataccggcagcgcgagtgacgaagaaggaagagcttagagcggcaattcagagaatgttggacacccctggcccctaccttcttgatgtcattgtgccccatcaggagcatgtgttgccgatgattcccagtaatggatccttcaaggatgtgataactgagggtgatggtagaacgaggtactgattgcctagaccaaatgttccttgatgcttgttttgtacaatatatataagataatgctgtcctagttgcaggatttggcctgtggtgagcatcatagtctgtagtagttttggtagcaagacattttattttccttttatttaacttactacatgcagtagcatctatctatctctgtagtctgatatctcctgttgtctgtattgtgccgttggattttttgctgtagtgagactgaaaatgatgtgctagtaataatatttctgttagaaatctaagtagagaatctgttgaagaagtcaaaagctaatggaatcaggttacatattcaatgtttttctttttttagcggttggtagacgtgtagattcaacttctcttggagctcacctaggcaatcagtaaaatgcatattccttttttaacttgccatttatttacttttagtggaaattgtgaccaatttgttcatgtagaacggatttggaccattgcgtccacaaaacgtctcttttgctcgatcttcacaaagcgataccgaaatccagagatagttttcaaaagtcagaaatggcaaagttataaatagtaaaacagaatagatgctgtaatcgacttcaataacaagtggcatcacgtttctagttctagacccatcagctgggccggcccagctgatgatcccggtgaagttcctattccgaagttcctattctccagaaagtataggaacttcactagagcttgcggccgcgcatgctgacttaatcagctaacgccactcgagggggggcccggtaccgg

SEQ ID NO: 845 - DNA, 8201 bp, Artificial sequence
  PHP39389A
cgcgccggtacccgggtaccgagctcactagacgcggtgaaattacctaattaacaccggtgtttatcaaacaagtttgtacaaaaaagcaggctccggccagaatggcccggaccgggttaccgaattctagaaatccgtcaacatggtggagcacgacactctcgtctactccaagaatatcaaagatacagtctcagaagaccaaagggctattgagacttttcaacaaagggtaatatcgggaaacctcctcggattccattgcccagctatctgtcacttcatcaaaaggacagtagaaaaggaaggtggcacctacaaatgccatcattgcgataaaggaaaggctatcgttcaagatgcctctgccgacagtggtcccaaagatggacccccacccacgaggagcatcgtggaaaaagaagacgttccaaccacgtcttcaaagcaagtggattgatgtgatatctccactgacgtaagggatgacgcacaatcccactagactctatcagtgatagagtgtatataagactctatcagtgatagagtgaactctatcagtgatagagttgtacttatttttacaacaattaccaacaacaacaaacaacaaacaacattacaattactatttacaattacagtcgacatggcctcctccgaggacgtcatcaaggagttcatgcgcttcaaggtgcgcatggagggctccgtgaacggccacgagttcgagatcgagggcgagggcgagggccgcccctacgagggcacccagaccgccaagctgaaggtgaccaagggcggccccctgcccttcgcctgggacatcctgtccccccagttccagtacggctccaaggtgtacgtgaagcaccccgccgacatccccgactacaagaagctgtccttccccgagggcttcaagtgggagcgcgtgatgaacttcgaggacggcggcgtggtgaccgtgacccaggactcctccctgcaggacggctccttcatctacaaggtgaagttcatcggcgtgaacttcccctccgacggccccgtaatgcagaagaagactatgggctgggaggcctccaccgagcgcctgtacccccgcgacggcgtgctgaagggcgagatccacaaggccctgaagctgaaggacggcggccactacctggtggagttcaagtccatctacatggccaagaagcccgtgcagctgcccggctactactacgtggactccaagctggacatcacctcccacaacgaggactacaccatcgtggagcagtacgagcgcgccgagggccgccaccacctgttcctgtagcggccccgctgaaatcaccagtctctctctacaaatctatctctctctataataatgtgtgagtagttcccagataagggaattagggttcttatagggtttcgctcatgtgttgagcatataagaaacccttagtatgtatttgtatttgtaaaatacttctatcaataaaatttctaattcctaaaaccaaaatccagtggcgagctcgagtctagacccgggtttacttattttgtgggtatctatacttttattagatttttaatcaggctcctgatttctttttatttcgattgaattcctgaacttgtattattcagtagatcgaataaattataaaaagataaaatcataaaataatattttatcctatcaatcatattaaagcaatgaatatgtaaaattaatcttatctttattttaaaaaatcatataggtttagtatttttttaaaaataaagataggattagttttactattcactgcttattacttttaaaaaaatcataaaggtttagtatttttttaaaataaatataggaatagttttactattcactgctttaatagaaaaatagtttaaaatttaagatagttttaatcccagcatttgccacgtttgaacgtgagccgaaacgatgtcgttacattatcttaacctagctgaaacgatgtcgtcataatatcgccaaatgccaactggactacgtcgaacccacaaatcccacaaagcgcgtgaaatcaaatcgctcaaaccacaaaaaagaacaacgcgtttgttacacgctcaatcccacgcgagtagagcacagtaaccttcaaataagcgaatggggcataatcagaaatccgaaataaacctaggggcattatcggaaatgaaaagtagctcactcaatataaaaatctaggaaccctagttttcgttatcactctgtgctccctcgctctatttctcagtctctgtgtttgcggctgaggattccgaacgagtgaccttcttcgtttctcgcaaaggtaacagcctctgctcttgtctcttcgattcgatctatgcctgtctcttatttacgatgatgtttcttcggttatgtttttttatttatgctttatgctgttgatgttcggttgtttgtttcgctttgtttttgtggttcagttttttaggattcttttggtttttgaatcgattaatcggaagagattttcgagttatttggtgtgttggaggtgaatcttttttttgaggtcatagatctgttgtatttgtgttataaacatgcgactttgtatgattttttacgaggttatgatgttctggttgttttattatgaatctgttgagacagaaccatgatttttgttgatgttcgtttacactattaaaggtttgttttaacaggattaaaagttttttaagcatgttgaaggagtcttgtagatatgtaaccgtcgatagtttttttgtgggtttgttcacatgttatcaagcttaatcttttactatgtatgcgaccatatctggatccagcaaaggcgattttttaattccttgtgaaacttttgtaatatgaagttgaaattttgttattggtaaactataaatgtgtgaagttggagtatacctttaccttcttatttggctttgtgatagtttaatttatatgtattttgagttctgacttgtatttctttgaattgattctagtttaagtaatccatggccagactcgacaagagcaaggtgatcaacagcgcactggagctgctgaacgaggtcggaatcgaaggcctcacaacccgtaagctcgcccagaagctcggggttgagcagcctacattgtactggcacgtcaagaacaagcgagctctgctagacgctatggccatcgagatgctcgatccccacgctccccacttgttacccttggaaggggcaagctggcaagacttcttgaggaacaacgctaagtccatgagatgcgctttgctcagtcaccgtgatggagccaaggtctgtctaggtacgggcttcacggagcaacagtatgaaactgctgagaacagccttgccttcctgacacaacaaggtttctcccttgagaacgccctctacgcaatgcaagctgttgggatctacactctgggttgcgcgttgctggatcaagagctgcaagtcgctaaggaggagagggaaacacctactactgatagtatgccgccactggttcgacaagctctggaactcaaggatcaccaaggtgcagagccagccttcctgttcggccttgaactgatcataagcggattggagaagcagctgaagcgtgaaagtgggtcttaatgataggcggccgctaaagaaggagtgcgtcgaagcagatcgttcaaacatttggcaataaagtttcttaagattgaatcctgttgccggtcttgcgatgattatcatataatttctgttgaattacgttaagcatgtaataattaacatgtaatgcatgacgttatttatgagatgggtttttatgattagagtcccgcaattatacatttaatacgcgatagaaaacaaaatatagcgcgcaaactaggataaattatcgcgcgcggtgtcatctatgttactagatcgatggatgggcacccagctttcttgtacaaagtggttcgataaacactagtaacggccgccagtgtgctggaattcgcccttcccaagctttgctctagatcaaactcacatccaaacataacatggatatcttccttaccaatcatactaattattttgggttaaatattaatcattatttttaagatattaattaagaaattaaaagattttttaaaaaaatgtataaaattatattattcatgatttttcatacatttgattttgataataaatatattttttttaatttcttaaaaaatgttgcaagacacttattagacatagtcttgttctgtttacaaaagcattcatcatttaatacattaaaaaatatttaatactaacagtagaatcttcttgtgagtggtgtgggagtaggcaacctggcattgaaacgagagaaagagagtcagaaccagaagacaaataaaaagtatgcaacaaacaaatcaaaatcaaagggcaaaggctggggttggctcaattggttgctacattcaattttcaactcagtcaacggttgagattcactctgacttccccaatctaagccgcggatgcaaacggttgaatctaacccacaatccaatctcgttacttaggggcttttccgtcattaactcacccctgccacccggtttccctataaattggaactcaatgctcccctctaaactcgtatcgcttcagagttgagaccaagacacactcgttcatatatctctctgctcttctcttctcttctacctctcaaggtacttttcttctccctctaccaaatcctagattccgtggttcaatttcggatcttgcacttctggtttgctttgccttgctttttcctcaactgggtccatctaggatccatgtgaaactctactctttctttaatatctgcggaatacgcgtttgactttcagatctagtcgaaatcatttcataattgcctttctttcttttagcttatgagaaataaaatcactttttttttatttcaaaataaaccttgggccttgtgctgactgagatggggtttggtgattacagaattttagcgaattttgtaattgtacttgtttgtctgtagttttgttttgttttcttgtttctcatacattccttaggcttcaattttattcgagtataggtcacaataggaattcaaactttgagcaggggaattaatcccttccttcaaatccagtttgtttgtatatatgtttaaaaaatgaaacttttgctttaaattctattataactttttttatggctgaaatttttgcatgtgtctttgctctctgttgtaaatttactgtttaggtactaactctaggcttgttgtgcagtttttgaagtataacaacagaagttcctattccgaagttcctattctctagaaagtataggaacttccaccacacaacacaatggcggccaccgcttccagaaccacccgattctcttcttcctcttcacaccccaccttccccaaacgcattactagatccaccctccctctctctcatcaaaccctcaccaaacccaaccacgctctcaaaatcaaatgttccatctccaaaccccccacggcggcgcccttcaccaaggaagcgccgaccacggagcccttcgtgtcacggttcgcctccggcgaacctcgcaagggcgcggacatccttgtggaggcgctggagaggcagggcgtgacgacggtgttcgcgtaccccggcggtgcgtcgatggagatccaccaggcgctcacgcgctccgccgccatccgcaacgtgctcccgcgccacgagcagggcggcgtcttcgccgccgaaggctacgcgcgttcctccggcctccccggcgtctgcattgccacctccggccccggcgccaccaacctcgtgagcggcctcgccgacgctttaatggacagcgtcccagtcgtcgccatcaccggccaggtcgcccgccggatgatcggcaccgacgccttccaagaaaccccgatcgtggaggtgagcagatccatcacgaagcacaactacctcatcctcgacgtcgacgacatcccccgcgtcgtcgccgaggctttcttcgtcgccacctccggccgccccggtccggtcctcatcgacattcccaaagacgttcagcagcaactcgccgtgcctaattgggacgagcccgttaacctccccggttacctcgccaggctgcccaggccccccgccgaggcccaattggaacacattgtcagactcatcatggaggcccaaaagcccgttctctacgtcggcggtggcagtttgaattccagtgctgaattgaggcgctttgttgaactcactggtattcccgttgctagcactttaatgggtcttggaacttttcctattggtgatgaatattcccttcagatgctgggtatgcatggtactgtttatgctaactatgctgttgacaatagtgatttgttgcttgcctttggggtaaggtttgatgaccgtgttactgggaagcttgaggcttttgctagtagggctaagattgttcacattgatattgattctgccgagattgggaagaacaagcaggcgcacgtgtcggtttgcgcggatttgaagttggccttgaagggaattaatatgattttggaggagaaaggagtggagggtaagtttgatcttggaggttggagagaagagattaatgtgcagaaacacaagtttccattgggttacaagacattccaggacgcgatttctccgcagcatgctatcgaggttcttgatgagttgactaatggagatgctattgttagtactggggttgggcagcatcaaatgtgggctgcgcagttttacaagtacaagagaccgaggcagtggttgacctcagggggtcttggagccatgggttttggattgcctgcggctattggtgctgctgttgctaaccctggggctgttgtggttgacattgatggggatggtagtttcatcatgaatgttcaggagttggccactataagagtggagaatctcccagttaagatattgttgttgaacaatcagcatttgggtatggtggttcagttggaggataggttctacaagtccaatagagctcacacctatcttggagatccgtctagcgagagcgagatattcccaaacatgctcaagtttgctgatgcttgtgggataccggcagcgcgagtgacgaagaaggaagagcttagagcggcaattcagagaatgttggacacccctggcccctaccttcttgatgtcattgtgccccatcaggagcatgtgttgccgatgattcccagtaatggatccttcaaggatgtgataactgagggtgatggtagaacgaggtactgattgcctagaccaaatgttccttgatgcttgttttgtacaatatatataagataatgctgtcctagttgcaggatttggcctgtggtgagcatcatagtctgtagtagttttggtagcaagacattttattttccttttatttaacttactacatgcagtagcatctatctatctctgtagtctgatatctcctgttgtctgtattgtgccgttggattttttgctgtagtgagactgaaaatgatgtgctagtaataatatttctgttagaaatctaagtagagaatctgttgaagaagtcaaaagctaatggaatcaggttacatattcaatgtttttctttttttagcggttggtagacgtgtagattcaacttctcttggagctcacctaggcaatcagtaaaatgcatattccttttttaacttgccatttatttacttttagtggaaattgtgaccaatttgttcatgtagaacggatttggaccattgcgtccacaaaacgtctcttttgctcgatcttcacaaagcgataccgaaatccagagatagttttcaaaagtcagaaatggcaaagttataaatagtaaaacagaatagatgctgtaatcgacttcaataacaagtggcatcacgtttctagttctagacccatcagctgggccggcccagctgatgatcccggtgaagttcctattccgaagttcctattctccagaaagtataggaacttcactagagcttgcggccgcgcatgctgacttaatcagctaacgccactcgagggggggcccggtaccgg

SEQ ID NO: 846 - DNA, 8201 bp, Artificial sequence
  PHP39390A
cgcgccggtacccgggtaccgagctcactagacgcggtgaaattacctaattaacaccggtgtttatcaaacaagtttgtacaaaaaagcaggctccggccagaatggcccggaccgggttaccgaattctagaaatccgtcaacatggtggagcacgacactctcgtctactccaagaatatcaaagatacagtctcagaagaccaaagggctattgagacttttcaacaaagggtaatatcgggaaacctcctcggattccattgcccagctatctgtcacttcatcaaaaggacagtagaaaaggaaggtggcacctacaaatgccatcattgcgataaaggaaaggctatcgttcaagatgcctctgccgacagtggtcccaaagatggacccccacccacgaggagcatcgtggaaaaagaagacgttccaaccacgtcttcaaagcaagtggattgatgtgatatctccactgacgtaagggatgacgcacaatcccactagactctatcagtgatagagtgtatataagactctatcagtgatagagtgaactctatcagtgatagagttgtacttatttttacaacaattaccaacaacaacaaacaacaaacaacattacaattactatttacaattacagtcgacatggcctcctccgaggacgtcatcaaggagttcatgcgcttcaaggtgcgcatggagggctccgtgaacggccacgagttcgagatcgagggcgagggcgagggccgcccctacgagggcacccagaccgccaagctgaaggtgaccaagggcggccccctgcccttcgcctgggacatcctgtccccccagttccagtacggctccaaggtgtacgtgaagcaccccgccgacatccccgactacaagaagctgtccttccccgagggcttcaagtgggagcgcgtgatgaacttcgaggacggcggcgtggtgaccgtgacccaggactcctccctgcaggacggctccttcatctacaaggtgaagttcatcggcgtgaacttcccctccgacggccccgtaatgcagaagaagactatgggctgggaggcctccaccgagcgcctgtacccccgcgacggcgtgctgaagggcgagatccacaaggccctgaagctgaaggacggcggccactacctggtggagttcaagtccatctacatggccaagaagcccgtgcagctgcccggctactactacgtggactccaagctggacatcacctcccacaacgaggactacaccatcgtggagcagtacgagcgcgccgagggccgccaccacctgttcctgtagcggccccgctgaaatcaccagtctctctctacaaatctatctctctctataataatgtgtgagtagttcccagataagggaattagggttcttatagggtttcgctcatgtgttgagcatataagaaacccttagtatgtatttgtatttgtaaaatacttctatcaataaaatttctaattcctaaaaccaaaatccagtggcgagctcgagtctagacccgggtttacttattttgtgggtatctatacttttattagatttttaatcaggctcctgatttctttttatttcgattgaattcctgaacttgtattattcagtagatcgaataaattataaaaagataaaatcataaaataatattttatcctatcaatcatattaaagcaatgaatatgtaaaattaatcttatctttattttaaaaaatcatataggtttagtatttttttaaaaataaagataggattagttttactattcactgcttattacttttaaaaaaatcataaaggtttagtatttttttaaaataaatataggaatagttttactattcactgctttaatagaaaaatagtttaaaatttaagatagttttaatcccagcatttgccacgtttgaacgtgagccgaaacgatgtcgttacattatcttaacctagctgaaacgatgtcgtcataatatcgccaaatgccaactggactacgtcgaacccacaaatcccacaaagcgcgtgaaatcaaatcgctcaaaccacaaaaaagaacaacgcgtttgttacacgctcaatcccacgcgagtagagcacagtaaccttcaaataagcgaatggggcataatcagaaatccgaaataaacctaggggcattatcggaaatgaaaagtagctcactcaatataaaaatctaggaaccctagttttcgttatcactctgtgctccctcgctctatttctcagtctctgtgtttgcggctgaggattccgaacgagtgaccttcttcgtttctcgcaaaggtaacagcctctgctcttgtctcttcgattcgatctatgcctgtctcttatttacgatgatgtttcttcggttatgtttttttatttatgctttatgctgttgatgttcggttgtttgtttcgctttgtttttgtggttcagttttttaggattcttttggtttttgaatcgattaatcggaagagattttcgagttatttggtgtgttggaggtgaatcttttttttgaggtcatagatctgttgtatttgtgttataaacatgcgactttgtatgattttttacgaggttatgatgttctggttgttttattatgaatctgttgagacagaaccatgatttttgttgatgttcgtttacactattaaaggtttgttttaacaggattaaaagttttttaagcatgttgaaggagtcttgtagatatgtaaccgtcgatagtttttttgtgggtttgttcacatgttatcaagcttaatcttttactatgtatgcgaccatatctggatccagcaaaggcgattttttaattccttgtgaaacttttgtaatatgaagttgaaattttgttattggtaaactataaatgtgtgaagttggagtatacctttaccttcttatttggctttgtgatagtttaatttatatgtattttgagttctgacttgtatttctttgaattgattctagtttaagtaatccatggccagactcgacaagagcaaggtgatcaacagcgcactggagctgctgaacgaggtcggaatcgaaggcctcacaacccgtaagctcgcccagaagctcggggttgagcagcctacattgtactggcacgtcaagaacaagcgagctctgctagacgctatggccattgagatgctcgatcgccacgctatacacttgttacccttggaaggggaaagctggcaagacttcttgaggaacaacgctaagtccatgagatgcgctttgctcagtcaccgtgatggagccaaggtctgtctaggtacgggcttcacggagcaacaatatgaaactgcggagaaccgccttgccttcctgacacaacaaggtttctcccttgagaacgccctctacgcatggcaagcagtggggatctacactctgggttgtgtcttgctggatcaagagctgcaagtcgctaaggaggagagggaaacacctactactgatagtatgccgccactggttcgacaagctctggaactcaaggatcaccaaggtgcagagccagccttcctgttcggccttgaactgatcataggcggattggagaagcagctgaagagtgaaagtgggtcttaatgataggcggccgctaaagaaggagtgcgtcgaagcagatcgttcaaacatttggcaataaagtttcttaagattgaatcctgttgccggtcttgcgatgattatcatataatttctgttgaattacgttaagcatgtaataattaacatgtaatgcatgacgttatttatgagatgggtttttatgattagagtcccgcaattatacatttaatacgcgatagaaaacaaaatatagcgcgcaaactaggataaattatcgcgcgcggtgtcatctatgttactagatcgatggatgggcacccagctttcttgtacaaagtggttcgataaacactagtaacggccgccagtgtgctggaattcgcccttcccaagctttgctctagatcaaactcacatccaaacataacatggatatcttccttaccaatcatactaattattttgggttaaatattaatcattatttttaagatattaattaagaaattaaaagattttttaaaaaaatgtataaaattatattattcatgatttttcatacatttgattttgataataaatatattttttttaatttcttaaaaaatgttgcaagacacttattagacatagtcttgttctgtttacaaaagcattcatcatttaatacattaaaaaatatttaatactaacagtagaatcttcttgtgagtggtgtgggagtaggcaacctggcattgaaacgagagaaagagagtcagaaccagaagacaaataaaaagtatgcaacaaacaaatcaaaatcaaagggcaaaggctggggttggctcaattggttgctacattcaattttcaactcagtcaacggttgagattcactctgacttccccaatctaagccgcggatgcaaacggttgaatctaacccacaatccaatctcgttacttaggggcttttccgtcattaactcacccctgccacccggtttccctataaattggaactcaatgctcccctctaaactcgtatcgcttcagagttgagaccaagacacactcgttcatatatctctctgctcttctcttctcttctacctctcaaggtacttttcttctccctctaccaaatcctagattccgtggttcaatttcggatcttgcacttctggtttgctttgccttgctttttcctcaactgggtccatctaggatccatgtgaaactctactctttctttaatatctgcggaatacgcgtttgactttcagatctagtcgaaatcatttcataattgcctttctttcttttagcttatgagaaataaaatcactttttttttatttcaaaataaaccttgggccttgtgctgactgagatggggtttggtgattacagaattttagcgaattttgtaattgtacttgtttgtctgtagttttgttttgttttcttgtttctcatacattccttaggcttcaattttattcgagtataggtcacaataggaattcaaactttgagcaggggaattaatcccttccttcaaatccagtttgtttgtatatatgtttaaaaaatgaaacttttgctttaaattctattataactttttttatggctgaaatttttgcatgtgtctttgctctctgttgtaaatttactgtttaggtactaactctaggcttgttgtgcagtttttgaagtataacaacagaagttcctattccgaagttcctattctctagaaagtataggaacttccaccacacaacacaatggcggccaccgcttccagaaccacccgattctcttcttcctcttcacaccccaccttccccaaacgcattactagatccaccctccctctctctcatcaaaccctcaccaaacccaaccacgctctcaaaatcaaatgttccatctccaaaccccccacggcggcgcccttcaccaaggaagcgccgaccacggagcccttcgtgtcacggttcgcctccggcgaacctcgcaagggcgcggacatccttgtggaggcgctggagaggcagggcgtgacgacggtgttcgcgtaccccggcggtgcgtcgatggagatccaccaggcgctcacgcgctccgccgccatccgcaacgtgctcccgcgccacgagcagggcggcgtcttcgccgccgaaggctacgcgcgttcctccggcctccccggcgtctgcattgccacctccggccccggcgccaccaacctcgtgagcggcctcgccgacgctttaatggacagcgtcccagtcgtcgccatcaccggccaggtcgcccgccggatgatcggcaccgacgccttccaagaaaccccgatcgtggaggtgagcagatccatcacgaagcacaactacctcatcctcgacgtcgacgacatcccccgcgtcgtcgccgaggctttcttcgtcgccacctccggccgccccggtccggtcctcatcgacattcccaaagacgttcagcagcaactcgccgtgcctaattgggacgagcccgttaacctccccggttacctcgccaggctgcccaggccccccgccgaggcccaattggaacacattgtcagactcatcatggaggcccaaaagcccgttctctacgtcggcggtggcagtttgaattccagtgctgaattgaggcgctttgttgaactcactggtattcccgttgctagcactttaatgggtcttggaacttttcctattggtgatgaatattcccttcagatgctgggtatgcatggtactgtttatgctaactatgctgttgacaatagtgatttgttgcttgcctttggggtaaggtttgatgaccgtgttactgggaagcttgaggcttttgctagtagggctaagattgttcacattgatattgattctgccgagattgggaagaacaagcaggcgcacgtgtcggtttgcgcggatttgaagttggccttgaagggaattaatatgattttggaggagaaaggagtggagggtaagtttgatcttggaggttggagagaagagattaatgtgcagaaacacaagtttccattgggttacaagacattccaggacgcgatttctccgcagcatgctatcgaggttcttgatgagttgactaatggagatgctattgttagtactggggttgggcagcatcaaatgtgggctgcgcagttttacaagtacaagagaccgaggcagtggttgacctcagggggtcttggagccatgggttttggattgcctgcggctattggtgctgctgttgctaaccctggggctgttgtggttgacattgatggggatggtagtttcatcatgaatgttcaggagttggccactataagagtggagaatctcccagttaagatattgttgttgaacaatcagcatttgggtatggtggttcagttggaggataggttctacaagtccaatagagctcacacctatcttggagatccgtctagcgagagcgagatattcccaaacatgctcaagtttgctgatgcttgtgggataccggcagcgcgagtgacgaagaaggaagagcttagagcggcaattcagagaatgttggacacccctggcccctaccttcttgatgtcattgtgccccatcaggagcatgtgttgccgatgattcccagtaatggatccttcaaggatgtgataactgagggtgatggtagaacgaggtactgattgcctagaccaaatgttccttgatgcttgttttgtacaatatatataagataatgctgtcctagttgcaggatttggcctgtggtgagcatcatagtctgtagtagttttggtagcaagacattttattttccttttatttaacttactacatgcagtagcatctatctatctctgtagtctgatatctcctgttgtctgtattgtgccgttggattttttgctgtagtgagactgaaaatgatgtgctagtaataatatttctgttagaaatctaagtagagaatctgttgaagaagtcaaaagctaatggaatcaggttacatattcaatgtttttctttttttagcggttggtagacgtgtagattcaacttctcttggagctcacctaggcaatcagtaaaatgcatattccttttttaacttgccatttatttacttttagtggaaattgtgaccaatttgttcatgtagaacggatttggaccattgcgtccacaaaacgtctcttttgctcgatcttcacaaagcgataccgaaatccagagatagttttcaaaagtcagaaatggcaaagttataaatagtaaaacagaatagatgctgtaatcgacttcaataacaagtggcatcacgtttctagttctagacccatcagctgggccggcccagctgatgatcccggtgaagttcctattccgaagttcctattctccagaaagtataggaacttcactagagcttgcggccgcgcatgctgacttaatcagctaacgccactcgagggggggcccggtaccgg

SEQ ID NO: 847 - DNA, 14225 bp, Artificial Sequence
  Construct containing artificial microRNA
cgcgccggtacccgggtaccgagctcactagacgcggtgaaattacctaattaacaccggtgtttatcaaacaagtttgtacaaaaaagcaggctccggccagaatggcccggaccgggttaccgaattctagaaatccgtcaacatggtggagcacgacactctcgtctactccaagaatatcaaagatacagtctcagaagaccaaagggctattgagacttttcaacaaagggtaatatcgggaaacctcctcggattccattgcccagctatctgtcacttcatcaaaaggacagtagaaaaggaaggtggcacctacaaatgccatcattgcgataaaggaaaggctatcgttcaagatgcctctgccgacagtggtcccaaagatggacccccacccacgaggagcatcgtggaaaaagaagacgttccaaccacgtcttcaaagcaagtggattgatgtgatatctccactgacgtaagggatgacgcacaatcccactagactctatcagtgatagagtgtatataagactctatcagtgatagagtgaactctatcagtgatagagttgtacttatttttacaacaattaccaacaacaacaaacaacaaacaacattacaattactatttacaattacagtcgacccgggatccaccatgtccaacctgctcacggttcaccagaaccttccggctcttccagtggacgcgacgtccgatgaagtcaggaagaacctcatggacatgttccgcgacaggcaagcgttcagcgagcacacctggaagatgctgctctccgtctgccgctcctgggctgcatggtgcaagctgaacaacaggaagtggttccccgctgagcccgaggacgtgagggattaccttctgtacctgcaagcgcgaggtttgtttctgcttctacctttgatatatatataataattatcattaattagtagtaatataatatttcaaatatttttttcaaaataaaagaatgtagtatatagcaattgcttttctgtagtttataagtgtgtatattttaatttataacttttctaatatatgaccaaaacatggtgatgcctaggtctggcagtgaagaccatccagcaacaccttggacaactgaacatgcttcacaggcgctccggcctcccgcgccccagcgactcgaacgccgtgagcctcgtcatgcgccgcatcaggaaggaaaacgtcgatgccggcgaaagggcaaagcaggccctcgcgttcgagaggaccgatttcgaccaggtccgcagcctgatggagaacagcgacaggtgccaggacattaggaacctggcgttcctcggaattgcatacaacacgctcctcaggatcgcggaaattgcccgcattcgcgtgaaggacattagccgcaccgacggcggcaggatgcttatccacattggcaggaccaagacgctcgtttccaccgcaggcgtcgaaaaggccctcagcctcggagtgaccaagctcgtcgaacgctggatctccgtgtccggcgtcgcggacgacccaaacaactacctcttctgccgcgtccgcaagaacggggtggctgcccctagcgccaccagccaactcagcacgagggccttggaaggtattttcgaggccacccaccgcctgatctacggcgcgaaggatgacagcggtcaacgctacctcgcatggtccgggcactccgcccgcgttggagctgctagggacatggcccgcgccggtgtttccatccccgaaatcatgcaggcgggtggatggacgaacgtgaacattgtcatgaactacattcgcaaccttgacagcgagacgggcgcaatggttcgcctcctggaagatggtgactgaggtacctaaagaaggagtgcgtcgaagcagatcgttcaaacatttggcaataaagtttcttaagattgaatcctgttgccggtcttgcgatgattatcatataatttctgttgaattacgttaagcatgtaataattaacatgtaatgcatgacgttatttatgagatgggtttttatgattagagtcccgcaattatacatttaatacgcgatagaaaacaaaatatagcgcgcaaactaggataaattatcgcgcgcggtgtcatctatgttactagatcggctcgactctagaggatcctcatcgctatcaactttgtatagaaaagttgggcccgaagttcctattccgaagttcctattctctagaaagtataggaacttcccataggattggcccggggctagcggatccttcgtccacagacatcaacatcttatcgtcctttgaagataagataataatgttgaagataagagtgggagccaccactaaaacattgctttgtcaaaagctaaaaaagatgatgcccgacagccacttgtgtgaagcatgagaagccggtccctccactaagaaaattagtgaagcatcttccagtggtccctccactcacagctcaatcagtgagcaacaggacgaaggaaatgacgtaagccatgacgtctaatcccacaagaatttccttatataaggaacacaaatcagaaggaagagatcaatcgaaatcaaaatcggaatcgaaatcaaaatcggaatcgaaatctctcatctaagatcactagtataacttcgtatagcatacattatacgaagttataagcttttacaagtttgtacaaaaaagcaggctccataggattggggccagaatggcccactcgacgatccaattccaatcccacaaaaatctgagcttaacagcacagttgctcctctcagagcagaatcgggtattcaacaccctcatatcaactactacgttgtgtataacggtccacatgccggtatatacgatgactggggttgtacaaaggcggcaacaaacggcgttcccggagttgcacacaagaaatttgccactattacagaggcaagagcagcagctgacgcgtacacaacaagtcagcaaacagacaggttgaacttcatccccaaaggagaagctcaactcaagcccaagagctttgctaaggccctaacaagcccaccaaagcaaaaagcccactggctcacgctaggaaccaaaaggcccagcagtgatccagccccaaaagagatctcctttgccccggagattacaatggacgatttcctctatctttacgatctaggaaggaagttcgaaggtgaaggtgacgacactatgttcaccactgataatgagaaggttagcctcttcaatttcagaaagaatgctgacccacagatggttagagaggcctacgcagcaggtctcatcaagacgatctacccgagtaacaatctccaggagatcaaataccttcccaagaaggttaaagatgcagtcaaaagattcaggactaattgcatcaagaacacagagaaagacatatttctcaagatcagaagtactattccagtatggacgattcaaggcttgcttcataaaccaaggcaagtaatagagattggagtctctaaaaaggtagttcctactgaatctaaggccatgcatggagtctaagattcaaatcgaggatctaacagaactcgccgtgaagactggcgaacagttcatacagagtcttttacgactcaatgacaagaagaaaatcttcgtcaacatggtggagcacgacactctggtctactccaaaaatgtcaaagatacagtctcagaagaccaaagggctattgagacttttcaacaaaggataatttcgggaaacctcctcggattccattgcccagctatctgtcacttcatcgaaaggacagtagaaaaggaaggtggctcctacaaatgccatcattgcgataaaggaaaggctatcattcaagatgcctctgccgacagtggtcccaaagatggacccccacccacgaggagcatcgtggaaaaagaagacgttccaaccacgtcttcaaagcaagtggattgatgtgacatctccactgacgtaagggatgacgcacaatcccactatccttcgcaagacccttcctctatataaggaagttcatttcatttggagaggacacgctcgagctcatttctctattacttcagccataacaaaagaactcttttctcttcttattaaaccatgaaaaagcctgaactcaccgcgacgtctgtcgagaagtttctgatcgaaaagttcgacagcgtctccgacctgatgcagctctcggagggcgaagaatctcgtgctttcagcttcgatgtaggagggcgtggatatgtcctgcgggtaaatagctgcgccgatggtttctacaaagatcgttatgtttatcggcactttgcatcggccgcgctcccgattccggaagtgcttgacattggggaattcagcgagagcctgacctattgcatctcccgccgtgcacagggtgtcacgttgcaagacctgcctgaaaccgaactgcccgctgttctgcagccggtcgcggaggccatggatgcgatcgctgcggccgatcttagccagacgagcgggttcggcccattcggaccgcaaggaatcggtcaatacactacatggcgtgatttcatatgcgcgattgctgatccccatgtgtatcactggcaaactgtgatggacgacaccgtcagtgcgtccgtcgcgcaggctctcgatgagctgatgctttgggccgaggactgccccgaagtccggcacctcgtgcacgcggatttcggctccaacaatgtcctgacggacaatggccgcataacagcggtcattgactggagcgaggcgatgttcggggattcccaatacgaggtcgccaacatcttcttctggaggccgtggttggcttgtatggagcagcagacgcgctacttcgagcggaggcatccggagcttgcaggatcgccgcggctccgggcgtatatgctccgcattggtcttgaccaactctatcagagcttggttgacggcaatttcgatgatgcagcttgggcgcagggtcgatgcgacgcaatcgtccgatccggagccgggactgtcgggcgtacacaaatcgcccgcagaagcgcggccgtctggaccgatggctgtgtagaagtactcgccgatagtggaaaccgacgccccagcactcgtccgagggcaaaggaatagtgaggtacctaaagaaggagtgcgtcgaagcagatcgttcaaacatttggcaataaagtttcttaagattgaatcctgttgccggtcttgcgatgattatcatataatttctgttgaattacgttaagcatgtaataattaacatgtaatgcatgacgttatttatgagatgggtttttatgattagagtcccgcaattatacatttaatacgcgatagaaaacaaaatatagcgcgcaaactaggataaattatcgcgcgcggtgtcatctatgttactagatcgatggtcggcctagaaggccacccagctttcttgtacaaagtggaactagtataacttcgtatagcatacattatacgaagttataagcttcaaaaaaaaaaaaaaccgcggccgcttctagctagctagggtttgggtagtgagtgtaataaagttgcaaagtttttggttaggttacgttttgaccttattattatagttcaaagggaaacattaattaaaggggattatgaagttcctcaacccaattccctcttgaggatcttactgggtgaattgagctgcttagctatggatcccacagttctacccatcaataagtgcttttgtggtagtcttgtggcttccatatctggggagcttcatttgcctttatagtattaaccttctgagggaaaagggttgaggaacacccttctcttcttttctctcataataatttaaatttgttatagactctaaactttaaatgttttttttgaagtttttccgtttttctcttttgccatgatcccgttcttgctgtggagtaaccttgtccgaggtatgtgcatgattagatccatacttaatttgtgtgcatcacgaaggtgaggttgaaatgaactttgcttttttgaccttttaggaaagttcttttgttgcagtaatcaattttaattagttttaattgacactattacttttattgtcatctttgttagttttattgttgaattgagtgcatatttcctaggaaattctcttacctaacattttttatacagatctatgctcttggctcttgcccttactcttggccttgtgttggttatttgtctacatatttattgactggtcgatgagacatgtcacaattcttgggcttatttgttggtctaataaaaggagtgcttattgaaagatcaagacggagattcggttttatataaataaactaaagatgacatattagtgtgttgatgtctcttcaggataatttttgtttgaaataatatggtaatgtcttgtctaaatttgtgtacataattcttactgattttttggattgttggatttttataaacaaatctgcggccgctagcgcgctgcagtggtaccttgatatctgcgcgcatctcgtctctgttatgcttaagaagttcaatgtttcgtttcatgtaaaactttggtggtttgtgttttggggccttgtataatccctgatgaataagtgttctactatgtttccgttcctgttatctctttctttctaatgacaagtcgaacttcttctttatcatcgcttcgtttttattatctgtgcttcttttgtttaatacgcctgcaaagtgactcgactctgtttagtgcagttctgcgaaacttgtaaatagtccaattgttggcctctagtaatagatgtagcgaaagtgttgagctgttgggttctaaggatggcttgaacatgttaatcttttaggttctgagtatgatgaacattcgttgttgctaagaaatgcctgtaatgtcccacaaatgtagaaaatggttcgtacctttgtccaagcattgatatgtctgatgagaggaaactgcaagatactgagcttggtttaacgaaggagaggcagtttcttccttccaaagcatttcatttgacaatgccttgatcatcttaagtagagtttctgttgtggaaagtttgaaactttgaagaaacgactctcaagtaaattgatgatcacaagtgaaagtgtatgttacataagtggatatttcaccctttttccatcaatcaaaacatcatatagtaatccattggtttatacaaacatcaaaatacatttacctctgaaatgaggaaaaaaatgcaaagagatttttgaaaatttccaacaaatggagagaaaaaaaaaaaacaaagaattaaatcaatcagtacatttataaaggttatgagacctatatgacacttattggtcaagtggcagccattccatttctagctctaattctggtcaccgaattcaggcctcctagggaagttcctattccgaagttcctattctccagaaagtataggaacttcgtcgagtctagacccgggtttacttattttgtgggtatctatacttttattagatttttaatcaggctcctgatttctttttatttcgattgaattcctgaacttgtattattcagtagatcgaataaattataaaaagataaaatcataaaataatattttatcctatcaatcatattaaagcaatgaatatgtaaaattaatcttatctttattttaaaaaatcatataggtttagtatttttttaaaaataaagataggattagttttactattcactgcttattacttttaaaaaaatcataaaggtttagtatttttttaaaataaatataggaatagttttactattcactgctttaatagaaaaatagtttaaaatttaagatagttttaatcccagcatttgccacgtttgaacgtgagccgaaacgatgtcgttacattatcttaacctagctgaaacgatgtcgtcataatatcgccaaatgccaactggactacgtcgaacccacaaatcccacaaagcgcgtgaaatcaaatcgctcaaaccacaaaaaagaacaacgcgtttgttacacgctcaatcccacgcgagtagagcacagtaaccttcaaataagcgaatggggcataatcagaaatccgaaataaacctaggggcattatcggaaatgaaaagtagctcactcaatataaaaatctaggaaccctagttttcgttatcactctgtgctccctcgctctatttctcagtctctgtgtttgcggctgaggattccgaacgagtgaccttcttcgtttctcgcaaaggtaacagcctctgctcttgtctcttcgattcgatctatgcctgtctcttatttacgatgatgtttcttcggttatgtttttttatttatgctttatgctgttgatgttcggttgtttgtttcgctttgtttttgtggttcagttttttaggattcttttggtttttgaatcgattaatcggaagagattttcgagttatttggtgtgttggaggtgaatcttttttttgaggtcatagatctgttgtatttgtgttataaacatgcgactttgtatgattttttacgaggttatgatgttctggttgttttattatgaatctgttgagacagaaccatgatttttgttgatgttcgtttacactattaaaggtttgttttaacaggattaaaagttttttaagcatgttgaaggagtcttgtagatatgtaaccgtcgatagtttttttgtgggtttgttcacatgttatcaagcttaatcttttactatgtatgcgaccatatctggatccagcaaaggcgattttttaattccttgtgaaacttttgtaatatgaagttgaaattttgttattggtaaactataaatgtgtgaagttggagtatacctttaccttcttatttggctttgtgatagtttaatttatatgtattttgagttctgacttgtatttctttgaattgattctagtttaagtaatccatggccagactcgacaagagcaaggtgatcaacagcgcactggagctgctgaacgaggtcggaatcgaaggcctcacaacccgtaagctcgcccagaagctcggggttgagcagcctacattgtactggcacgtcaagaacaagcgagctctgctagacgctatggccattgagatgctcgatcgccacgctatacacttgttacccttggaaggggaaagctggcaagacttcttgaggaacaacgctaagtccatgagatgcgctttgctcagtcaccgtgatggagccaaggtctgtctaggtacgggcttcacggagcaacaatatgaaactgcggagaaccgccttgccttcctgacacaacaaggtttctcccttgagaacgccctctacgcatggcaagcagtggggatctacactctgggttgtgtcttgctggatcaagagctgcaagtcgctaaggaggagagggaaacacctactactgatagtatgccgccactggttcgacaagctctggaactcaaggatcaccaaggtgcagagccagccttcctgttcggccttgaactgatcataggcggattggagaagcagctgaagagtgaaagtgggtcttaatgataggcggccgctaaagaaggagtgcgtcgaagcagatcgttcaaacatttggcaataaagtttcttaagattgaatcctgttgccggtcttgcgatgattatcatataatttctgttgaattacgttaagcatgtaataattaacatgtaatgcatgacgttatttatgagatgggtttttatgattagagtcccgcaattatacatttaatacgcgatagaaaacaaaatatagcgcgcaaactaggataaattatcgcgcgcggtgtcatctatgttactagatcgatggatgggcacccagctttcttgtacaaagtggttcgataaacactagtaacggccgccagtgtgctggaattcgcccttcccaagctttgctctagatcaaactcacatccaaacataacatggatatcttccttaccaatcatactaattattttgggttaaatattaatcattatttttaagatattaattaagaaattaaaagattttttaaaaaaatgtataaaattatattattcatgatttttcatacatttgattttgataataaatatattttttttaatttcttaaaaaatgttgcaagacacttattagacatagtcttgttctgtttacaaaagcattcatcatttaatacattaaaaaatatttaatactaacagtagaatcttcttgtgagtggtgtgggagtaggcaacctggcattgaaacgagagaaagagagtcagaaccagaagacaaataaaaagtatgcaacaaacaaatcaaaatcaaagggcaaaggctggggttggctcaattggttgctacattcaattttcaactcagtcaacggttgagattcactctgacttccccaatctaagccgcggatgcaaacggttgaatctaacccacaatccaatctcgttacttaggggcttttccgtcattaactcacccctgccacccggtttccctataaattggaactcaatgctcccctctaaactcgtatcgcttcagagttgagaccaagacacactcgttcatatatctctctgctcttctcttctcttctacctctcaaggtacttttcttctccctctaccaaatcctagattccgtggttcaatttcggatcttgcacttctggtttgctttgccttgctttttcctcaactgggtccatctaggatccatgtgaaactctactctttctttaatatctgcggaatacgcgtttgactttcagatctagtcgaaatcatttcataattgcctttctttcttttagcttatgagaaataaaatcactttttttttatttcaaaataaaccttgggccttgtgctgactgagatggggtttggtgattacagaattttagcgaattttgtaattgtacttgtttgtctgtagttttgttttgttttcttgtttctcatacattccttaggcttcaattttattcgagtataggtcacaataggaattcaaactttgagcaggggaattaatcccttccttcaaatccagtttgtttgtatatatgtttaaaaaatgaaacttttgctttaaattctattataactttttttatggctgaaatttttgcatgtgtctttgctctctgttgtaaatttactgtttaggtactaactctaggcttgttgtgcagtttttgaagtataacaacagaagttcctattccgaagttcctattctctagaaagtataggaacttccaccacacaacacaatggcggccaccgcttccagaaccacccgattctcttcttcctcttcacaccccaccttccccaaacgcattactagatccaccctccctctctctcatcaaaccctcaccaaacccaaccacgctctcaaaatcaaatgttccatctccaaaccccccacggcggcgcccttcaccaaggaagcgccgaccacggagcccttcgtgtcacggttcgcctccggcgaacctcgcaagggcgcggacatccttgtggaggcgctggagaggcagggcgtgacgacggtgttcgcgtaccccggcggtgcgtcgatggagatccaccaggcgctcacgcgctccgccgccatccgcaacgtgctcccgcgccacgagcagggcggcgtcttcgccgccgaaggctacgcgcgttcctccggcctccccggcgtctgcattgccacctccggccccggcgccaccaacctcgtgagcggcctcgccgacgctttaatggacagcgtcccagtcgtcgccatcaccggccaggtcgcccgccggatgatcggcaccgacgccttccaagaaaccccgatcgtggaggtgagcagatccatcacgaagcacaactacctcatcctcgacgtcgacgacatcccccgcgtcgtcgccgaggctttcttcgtcgccacctccggccgccccggtccggtcctcatcgacattcccaaagacgttcagcagcaactcgccgtgcctaattgggacgagcccgttaacctccccggttacctcgccaggctgcccaggccccccgccgaggcccaattggaacacattgtcagactcatcatggaggcccaaaagcccgttctctacgtcggcggtggcagtttgaattccagtgctgaattgaggcgctttgttgaactcactggtattcccgttgctagcactttaatgggtcttggaacttttcctattggtgatgaatattcccttcagatgctgggtatgcatggtactgtttatgctaactatgctgttgacaatagtgatttgttgcttgcctttggggtaaggtttgatgaccgtgttactgggaagcttgaggcttttgctagtagggctaagattgttcacattgatattgattctgccgagattgggaagaacaagcaggcgcacgtgtcggtttgcgcggatttgaagttggccttgaagggaattaatatgattttggaggagaaaggagtggagggtaagtttgatcttggaggttggagagaagagattaatgtgcagaaacacaagtttccattgggttacaagacattccaggacgcgatttctccgcagcatgctatcgaggttcttgatgagttgactaatggagatgctattgttagtactggggttgggcagcatcaaatgtgggctgcgcagttttacaagtacaagagaccgaggcagtggttgacctcagggggtcttggagccatgggttttggattgcctgcggctattggtgctgctgttgctaaccctggggctgttgtggttgacattgatggggatggtagtttcatcatgaatgttcaggagttggccactataagagtggagaatctcccagttaagatattgttgttgaacaatcagcatttgggtatggtggttcagttggaggataggttctacaagtccaatagagctcacacctatcttggagatccgtctagcgagagcgagatattcccaaacatgctcaagtttgctgatgcttgtgggataccggcagcgcgagtgacgaagaaggaagagcttagagcggcaattcagagaatgttggacacccctggcccctaccttcttgatgtcattgtgccccatcaggagcatgtgttgccgatgattcccagtaatggatccttcaaggatgtgataactgagggtgatggtagaacgaggtactgattgcctagaccaaatgttccttgatgcttgttttgtacaatatatataagataatgctgtcctagttgcaggatttggcctgtggtgagcatcatagtctgtagtagttttggtagcaagacattttattttccttttatttaacttactacatgcagtagcatctatctatctctgtagtctgatatctcctgttgtctgtattgtgccgttggattttttgctgtagtgagactgaaaatgatgtgctagtaataatatttctgttagaaatctaagtagagaatctgttgaagaagtcaaaagctaatggaatcaggttacatattcaatgtttttctttttttagcggttggtagacgtgtagattcaacttctcttggagctcacctaggcaatcagtaaaatgcatattccttttttaacttgccatttatttacttttagtggaaattgtgaccaatttgttcatgtagaacggatttggaccattgcgtccacaaaacgtctcttttgctcgatcttcacaaagcgataccgaaatccagagatagttttcaaaagtcagaaatggcaaagttataaatagtaaaacagaatagatgctgtaatcgacttcaataacaagtggcatcacgtttctagttctagacccatcagctgggccggcccagctgatgatcccggtgaagttcctattccgaagttcctattctccagaaagtataggaacttcactagagcttgcggccgcgcatgctgacttaatcagctaacgccactcgagggggggcccggtaccgg

SEQ ID NO: 848 - DNA, 19 bp, Artificial Sequence
  Tet operator sequence
actctatcagtgatagagt

SEQ ID NO: 849 - DNA, 1497 bp, Oryza sativa
tcaaatcttttttccatctacatccaatttatcatgtcaaagaaatggtctacatacagctaaggagatttatcgacgaatagtagctagcatactcgaggtcattcatatgcttgagaagagagtcgggatagtccaaaataaaacaaaggtaagattacctggtcaaaagtgaaaacatcagttaaaaggtggtataaagtaaaatatcggtaataaaaggtggcccaaagtgaaatttactcttttctactattataaaaattgaggatgtttttgtcggtactttgatacgtcatttttgtatgaattggtttttaagtttattcgcttttggaaatgcatatctgtatttgagtcgggttttaagttcgtttgcttttgtaaatacagagggatttgtataagaaatatctttaaaaaaacccatatgctaatttgacataatttttgagaaaaatatatattcaggcgaattctcacaatgaacaataataagattaaaatagctttcccccgttgcagcgcatgggtattttttctagtaaaaataaaagataaacttagactcaaaacatttacaaaaacaacccctaaagttcctaaagcccaaagtgctatccacgatccatagcaagcccagcccaacccaacccaacccaacccaccccagtccagccaactggacaatagtctccacacccccccactatcaccgtgagttgtccgcacgcaccgcacgtctcgcagccaaaaaaaaaaaaagaaagaaaaaaaagaaaaagaaaaaacagcaggtgggtccgggtcgtgggggccggaaacgcgaggaggatcgcgagccagcgacgaggccggccctccctccgcttccaaagaaacgccccccatcgccactatatacatacccccccctctcctcccatccccccaaccctaccaccaccaccaccaccacctccacctcctcccccctcgctgccggacgacgagctcctcccccctccccctccgccgccgccgcgccggtaaccaccccgcccctctcctctttctttctccgttttttttttccgtctcggtctcgatctttggccttggtagtttgggtgggcgagaggcggcttcgtgcgcgcccagatcggtgcgcgggaggggcgggatctcgcggctggggctctcgccggcgtggatccggcccggatctcgcggggaatggggctctcggatgtagatctgcgatccgccgttgttgggggagatgatggggggtttaaaatttccgccatgctaaacaagatcaggaagaggggaaaagggcactatggtttatatttttatatatttctgctgcttcgtcaggcttagatgtgctagatctttctttcttctttttgtgggtagaatttgaatccctcagcattgttcatcggtagtttttcttttcatgatttgtgacaaatgcagcctcgtgcggagcttttttgtaggtagaag

SEQ ID NO: 850 - DNA, 1053 bp, Badnavirus sp.
gataaaaaggagttgatcataagaacagacagccaggccattgtagccttctacaagaagcaagcggatcacaagccttcaagaacgagatggcttatgttgattgattacattactgggctcggaatcaacgttaaatttgagcacattgacggaaaagaaaatgtcctagctgacactttatcaagattggtccaagttctaatcacaagggttcatcatccagcagagactcagctagttgaagccgtcatggaagtcctgagcaatccgaaaaaggaagccttggataaggtaaatcattttatctttctaacccaacaatggattgcagaacaaagaaaggagcatatggtgaacacactgctccagttggaagaacctcaactacactgcggctgcaaagatcacacaacaggagaaagaaggaacgccgttcttctccaaagtcacacctcagccaacccgtatagatggttctataagtgtgcacaagacagatgtcacacttggatttggaaggacatcctggaccagtatgctgaagattatgccgcttacaccaggattggacttgaggcacttagccttgaagactggttcgaagaaccagaacccgatccacctgacccagtggaccgccagaagatagaagatatcctggacctgcaagatgtcagcaatgacgattgaaagattcccaggatagccggcggacgtggtggacccagtctaggtgcgatgcttagtcacgcacgatgactctgtcggaaggcatctttactttcggcaaactttaataatactttaggaaaagtattgtacaagttaggtgcagaatcaataatgcacccagctttagtcttgtctactgaattattgtgtcggttgcattattggatgcctgcgtgcaccctaagcaatccccggctctcatctctataagaggagcctttgtattcagttgcaagcatgcaagtcacacactgcaagcttacttctgagcaaaaagagttttgagtgaaataaatttgaagttcccccttacatctt

SEQ ID NO: 851 - DNA, 384 bp, Mirabilis mosaic virus
ttcgtccacagacatcaacatcttatcgtcctttgaagataagataataatgttgaagataagagtgggagccaccactaaaacattgctttgtcaaaagctaaaaaagatgatgcccgacagccacttgtgtgaagcatgagaagccggtccctccactaagaaaattagtgaagcatcttccagtggtccctccactcacagctcaatcagtgagcaacaggacgaaggaaatgacgtaagccatgacgtctaatcccacaagaatttccttatataaggaacacaaatcagaaggaagagatcaatcgaaatcaaaatcggaatcgaaatcaaaatcggaatcgaaatctctcatctaagagctcaaaaaaaaaaaaaacc

SEQ ID NO: 852 - DNA, 660 bp, Mirabilis mosaic virus
ccaattcgtcaacttcgtccacagacatcaacatcttatcgtcctttgaagataagataataatgttgaagataagagtgggagcccccactaaaacattgctttgtcaaaagctaaaaaagatgatgcccgacagccacttgtgtgaagcatgagaagccggtccctccactaagaaaattagtgaagcatcttccagtggtccctccactcacagctcaatcagtgagcaacaggacgaaggaaatgacgtaagccatgacgtctaatcccaacttcgtccacagacatcaacatcttatcgtcctttgaagataagataataatgttgaagataagagtgggagccaccactaaaacattgctttgtcaaaagctaaaaaagatgatgcccgacagccacttgtgtgaagcatgagaagccggtccctccactaagaaaattagtgaagcatcttccagtggtccctccactcacagctcaatcagtgagcaacaggacgaaggaaatgacgtaagccatgacgtctaatcccacaagaatttccttatataaggaacacaaatcagaaggaagagatcaatcgaaatcaaaatcggaatcgaaatcaaaatcggaatcgaaatctctcatctaagagctcaaaaaaaaaaaaaacc

SEQ ID NO: 853 - DNA, 998 bp, Zea mays
gccatcatcaccctaccccgagctgactcgggccgcagggaaccagaccggtgtcccatctggctagctccgccagataggcaatgaaggcgccccgcatgctctgtgacgacggtggctctcatcccccttacggaagcaagaggacgtcagcaaggacccaaccgctccgacagttgtccctccgccaggctccatcgctcctccgacggccacgacatcgcaccagctgggtgccaaaatctctccggctgccacgacggcatgtacttagggcgctagctctcccccgctagacacgtagcactctgctacaccccccattgtacacctggatcctctccttacacctataaaaggaaggaccagggccctctcagagaaggttggccgcgcggggacgaggacgagacaggcgctcgcttggggccgctcgctccctctcccacgtggacgcttgtaaccccctactgcaagcgcacccgatctgggcgcgggacgaacacgaaggctgcgggattcccacctctctcacgccggtctccggccgcctcgctctccccccttcgcgctcgccctcgcgctcgatccatctgggctggggcacgcggcgacactcactcgtcggcccaagggacccccggtctcgaaacgccgacaatatgatatatagaaactataatgatacacatgcaattaactagtgctgataatatatttacactgtagatttttccgataagtagaaaccaaatatttcaccgccacaaaaggcttcatcccatcagttacccatgtagcaaaaccaaaatacttgtgtgcgagaggccaagagcccaaaccaccgccaaggaaacccccagcccaccaggcgccttcctctataaataccctaactccggtggccgaagttcctcacccattcactcactcatctcaaggcctaggtagcaccgtagcagctactagaagcagctagccagaacaactcgtccatg

SEQ ID NO: 854 - DNA, 1502 bp, Glycine max
gggtttacttattttgtgggtatctatacttttattagatttttaatcaggctcctgatttctttttatttcgattgaattcctgaacttgtattattcagtagatcgaataaattataaaaagataaaatcataaaataatattttatcctatcaatcatattaaagcaatgaatatgtaaaattaatcttatctttattttaaaaaatcatataggtttagtatttttttaaaaataaagataggattagttttactattcactgcttattacttttaaaaaaatcataaaggtttagtatttttttaaaataaatataggaatagttttactattcactgctttaatagaaaaatagtttaaaatttaagatagttttaatcccagcatttgccacgtttgaacgtgagccgaaacgatgtcgttacattatcttaacctagctgaaacgatgtcgtcataatatcgccaaatgccaactggactacgtcgaacccacaaatcccacaaagcgcgtgaaatcaaatcgctcaaaccacaaaaaagaacaacgcgtttgttacacgctcaatcccacgcgagtagagcacagtaaccttcaaataagcgaatggggcataatcagaaatccgaaataaacctaggggcattatcggaaatgaaaagtagctcactcaatataaaaatctaggaaccctagttttcgttatcactctgtgctccctcgctctatttctcagtctctgtgtttgcggctgaggattccgaacgagtgaccttcttcgtttctcgcaaaggtaacagcctctgctcttgtctcttcgattcgatctatgcctgtctcttatttacgatgatgtttcttcggttatgtttttttatttatgctttatgctgttgatgttcggttgtttgtttcgctttgtttttgtggttcagttttttaggattcttttggtttttgaatcgattaatcggaagagattttcgagttatttggtgtgttggaggtgaatcttttttttgaggtcatagatctgttgtatttgtgttataaacatgcgactttgtatgattttttacgaggttatgatgttctggttgttttattatgaatctgttgagacagaaccatgatttttgttgatgttcgtttacactattaaaggtttgttttaacaggattaaaagttttttaagcatgttgaaggagtcttgtagatatgtaaccgtcgatagtttttttgtgggtttgttcacatgttatcaagcttaatcttttactatgtatgcgaccatatctggatccagcaaaggcgattttttaattccttgtgaaacttttgtaatatgaagttgaaattttgttattggtaaactataaatgtgtgaagttggagtatacctttaccttcttatttggctttgtgatagtttaatttatatgtattttgagttctgacttgtatttctttgaattgattctagtttaagtaatcc

SEQ ID NO: 855 - DNA, 1497 bp, Artificial Sequence
  Actin promoter engineered with tet operators
tcaaatcttttttccatctacatccaatttatcatgtcaaagaaatggtctacatacagctaaggagatttatcgacgaatagtagctagcatactcgaggtcattcatatgcttgagaagagagtcgggatagtccaaaataaaacaaaggtaagattacctggtcaaaagtgaaaacatcagttaaaaggtggtataaagtaaaatatcggtaataaaaggtggcccaaagtgaaatttactcttttctactattataaaaattgaggatgtttttgtcggtactttgatacgtcatttttgtatgaattggtttttaagtttattcgcttttggaaatgcatatctgtatttgagtcgggttttaagttcgtttgcttttgtaaatacagagggatttgtataagaaatatctttaaaaaaacccatatgctaatttgacataatttttgagaaaaatatatattcaggcgaattctcacaatgaacaataataagattaaaatagctttcccccgttgcagcgcatgggtattttttctagtaaaaataaaagataaacttagactcaaaacatttacaaaaacaacccctaaagttcctaaagcccaaagtgctatccacgatccatagcaagcccagcccaacccaacccaacccaacccaccccagtccagccaactggacaatagtctccacacccccccactatcaccgtgagttgtccgcacgcaccgcacgtctcgcagccaaaaaaaaaaaaagaaagaaaaaaaagaaaaagaaaaaacagcaggtgggtccgggtcgtgggggccggaaacgcgaggaggatcgcgagccagcgacgaggccggccctccctccgcttccaactctatcagtgatagagtcactatatactctatcagtgatagagtcccatccccccaaccctaccactctatcagtgatagagtccacctcctcccccctcgctgccggacgacgagctcctcccccctccccctccgccgccgccgcgccggtaaccaccccgcccctctcctctttctttctccgttttttttttccgtctcggtctcgatctttggccttggtagtttgggtgggcgagaggcggcttcgtgcgcgcccagatcggtgcgcgggaggggcgggatctcgcggctggggctctcgccggcgtggatccggcccggatctcgcggggaatggggctctcggatgtagatctgcgatccgccgttgttgggggagatgatggggggtttaaaatttccgccatgctaaacaagatcaggaagaggggaaaagggcactatggtttatatttttatatatttctgctgcttcgtcaggcttagatgtgctagatctttctttcttctttttgtgggtagaatttgaatccctcagcattgttcatcggtagtttttcttttcatgatttgtgacaaatgcagcctcgtgcggagcttttttgtaggtagaag

SEQ ID NO: 856 - DNA, 1051 bp, Artificial Sequence
  BSV promoter engineered with tet operators
gataaaaaggagttgatcataagaacagacagccaggccattgtagccttctacaagaagcaagcggatcacaagccttcaagaacgagatggcttatgttgattgattacattactgggctcggaatcaacgttaaatttgagcacattgacggaaaagaaaatgtcctagctgacactttatcaagattggtccaagttctaatcacaagggttcatcatccagcagagactcagctagttgaagccgtcatggaagtcctgagcaatccgaaaaaggaagccttggataaggtaaatcattttatctttctaacccaacaatggattgcagaacaaagaaaggagcatatggtgaacacactgctccagttggaagaacctcaactacactgcggctgcaaagatcacacaacaggagaaagaaggaacgccgttcttctccaaagtcacacctcagccaacccgtatagatggttctataagtgtgcacaagacagatgtcacacttggatttggaaggacatcctggaccagtatgctgaagattatgccgcttacaccaggattggacttgaggcacttagccttgaagactggttcgaagaaccagaacccgatccacctgacccagtggaccgccagaagatagaagatatcctggacctgcaagatgtcagcaatgacgattgaaagattcccaggatagccggcggacgtggtggacccagtctaggtgcgatgcttagtcacgcacgatgactctgtcggaaggcatctttactttcggcaaactttaataatactttaggaaaagtattgtacaagttaggtgcagaatcaataatgcacccagctttagtcttgtctactgaattattgtgtcggttgcattattggatgcctgcgtgcaccctaactctatcagtgatagagtctctataagactctatcagtgatagagtgcaactctatcagtgatagaggcaagcttacttctgagcaaaaagagttttgagtgaaataaatttgaagttcccccttacatctt

SEQ ID NO: 857 - DNA, 414 bp, Artificial Sequence
  MMV promoter engineered with tet operators
ttcgtccacagacatcaacatcttatcgtcctttgaagataagataataatgttgaagataagagtgggagccaccactaaaacattgctttgtcaaaagctaaaaaagatgatgcccgacagccacttgtgtgaagcatgagaagccggtccctccactaagaaaattagtgaagcatcttccagtggtccctccactcacagctcaatcagtgagcaacaggacgaaggaaatgacgtaagccatgacgtctaatcccacactctatcagtgatagagtttatataagactctatcagtgatagagtgaactctatcagtgatagagtgagatcaatcgaaatcaaaatcggaatcgaaatcaaaatcggaatcgaaatctctcatctaagagctcaaaaaaaaaaaaaacc

SEQ ID NO: 858 - DNA, 693 bp, Artificial Sequence
  dMMV promoter engineered with tet operators
aaaccaattcgtcaacttcgtccacagacatcaacatcttatcgtcctttgaagataagataataatgttgaagataagagtgggagcccccactaaaacattgctttgtcaaaagctaaaaaagatgatgcccgacagccacttgtgtgaagcatgagaagccggtccctccactaagaaaattagtgaagcatcttccagtggtccctccactcacagctcaatcagtgagcaacaggacgaaggaaatgacgtaagccatgacgtctaatcccaacttcgtccacagacatcaacatcttatcgtcctttgaagataagataataatgttgaagataagagtgggagccaccactaaaacattgctttgtcaaaagctaaaaaagatgatgcccgacagccacttgtgtgaagcatgagaagccggtccctccactaagaaaattagtgaagcatcttccagtggtccctccactcacagctcaatcagtgagcaacaggacgaaggaaatgacgtaagccatgacgtctaatcccacactctatcagtgatagagtttatataagactctatcagtgatagagtgaactctatcagtgatagagtgagatcaatcgaaatcaaaatcggaatcgaaatcaaaatcggaatcgaaatctctcatctaagagctcaaaaaaaaaaaaaacc

SEQ ID NO: 859 - DNA, 997 bp, Artificial sequence
  MP1 promoter engineered with tet operators
gggccatcatcaccctaccccgagctgactcgggccgcagggaaccagaccggtgtcccatctggctagctccgccagataggcaatgaaggcgccccgcatgctctgtgacgacggcggctctcagcccccttacggaagcaagaggacgtcagcaaggacccaaccgctccgacagctgtccctccgccaggctccatcgctcctccgacggccacgacatcgcaccagctgggtgccaaaatctctccggctgccacgacggcatgtacttagggcgctagctctcccccgctagacacgtagcactctgctacaccccccattgtacacctggatcctctccttacacctataaaaggaaggaccagggccctctcagagaaggttggccgcgcggggacgaggacgagacaggcgctcgcttggggccgctcgctccctctcccacgtggacgcttgtaaccccctactgcaagcgcacccgacctgggcgcgggacgaacacgaaggccgcgggattcccacctctctcacgccggtctccggccgcctcgctctccccccttcgcgctcgccctcgcgctcgatccatctaggctggggcacgcggcgacactcactcgtcggcccaagagacccccggtctcgaaacgccgacaatatgatatatagaaactataatgatacacatgcaattaactagtgctgataatatatttacactgtagatttttccgataagtagaaaccaaatatttcaccgccacaaaaggcttcatcccatcagttacccatgtagcaaaaccaaaatacttgtgtgcgagaggccaagagcccaaaccaccgccaaggaaacccccagcactctatcagtgatagagtataaatactctatcagtgatagagtaagttcctcacccattcactctatcagtgatagagttaggtagcaccgtagcagctactagaagcagctagccagagatccaccatg

SEQ ID NO: 860 - DNA, 1559 bp, Artificial Sequence
  EF1A promoter engineered with tet operators
gggtttacttattttgtgggtatctatacttttattagatttttaatcaggctcctgatttctttttatttcgattgaattcctgaacttgtattattcagtagatcgaataaattataaaaagataaaatcataaaataatattttatcctatcaatcatattaaagcaatgaatatgtaaaattaatcttatctttattttaaaaaatcatataggtttagtatttttttaaaaataaagataggattagttttactattcactgcttattacttttaaaaaaatcataaaggtttagtatttttttaaaataaatataggaatagttttactattcactgctttaatagaaaaatagtttaaaatttaagatagttttaatcccagcatttgccacgtttgaacgtgagccgaaacgatgtcgttacattatcttaacctagctgaaacgatgtcgtcataatatcgccaaatgccaactggactacgtcgaacccacaaatcccacaaagcgcgtgaaatcaaatcgctcaaaccacaaaaaagaacaacgcgtttgttacacgctcaatcccacgcgagtagagcacagtaaccttcaaataagcgaatggggcataatcagaaatccgaaataaacctaggggcattatcggaaatgaaaagtagctcactcaatataaaaatctaggaaccctagttttcgttatcactctatcagtgatagagtactctatcagtgatagagtactctgtgctccctcgctctatttctcagtctctgtgtttgcggctgaggattccgaacactctatcagtgatagagtgagtgaccttcttcgtttctcgcaaaggtaacagcctctgctcttgtctcttcgattcgatctatgcctgtctcttatttacgatgatgtttcttcggttatgtttttttatttatgctttatgctgttgatgttcggttgtttgtttcgctttgtttttgtggttcagttttttaggattcttttggtttttgaatcgattaatcggaagagattttcgagttatttggtgtgttggaggtgaatcttttttttgaggtcatagatctgttgtatttgtgttataaacatgcgactttgtatgattttttacgaggttatgatgttctggttgttttattatgaatctgttgagacagaaccatgatttttgttgatgttcgtttacactattaaaggtttgttttaacaggattaaaagttttttaagcatgttgaaggagtcttgtagatatgtaaccgtcgatagtttttttgtgggtttgttcacatgttatcaagcttaatcttttactatgtatgcgaccatatctggatccagcaaaggcgattttttaattccttgtgaaacttttgtaatatgaagttgaaattttgttattggtaaactataaatgtgtgaagttggagtatacctttaccttcttatttggctttgtgatagtttaatttatatgtattttgagttctgacttgtatttctttgaattgattctagtttaagtaatcc

SEQ ID NO: 861 - DNA, 933 bp, Artificial sequence
  35S CaMV promoter with ADH1 intron
agaagaccaaagggcaattgagacttttcaacaaagggtaatatcgggaaacctcctcggattccattgcccagctatctgtcacttcatcaaaaggacagtagaaaaggaaggtggcacctacaaatgccatcattgcgataaaggaaaggctatcgttcaagatgcctctgccgacagtggtcccaaagatggacccccacccacgaggagcatcgtggaaaaagaagacgttccaaccacgtcttcaaagcaagtggattgatgtgatatctccactgacgtaagggatgacgcacaatcccactatccttcgcaagacccttcctctatataaggaagttcatttcatttggagaggacgacctgcaggtcgacggatcaagtgcaaaggtccgccttgtttctcctctgtctcttgatctgactaatcttggtttatgattcgttgagtaattttggggaaagcttcgtccacagtttttttttcgatgaacagtgccgcagtggcgctgatcttgtatgctatcctgcaatcgtggtgaacttatttcttttatatccttcactcccatgaaaaggctagtaatctttctcgatgtaacatcgtccagcactgctattaccgtgtggtccatccgacagtctggctgaacacatcatacgatattgagcaaagatcgatctatcttccctgttctttaatgaaagacgtcattttcatcagtatgatctaagaatgttgcaacttgcaaggaggcgtttctttctttgaatttaactaactcgttgagtggccctgtttctcggacgtaaggcctttgctgctccacacatgtccattcgaattttaccgtgtttagcaagggcgaaaagtttgcatcttgatgatttagcttgactatgcgattgctttcctggacccgtgcagcc

SEQ ID NO: 862 - DNA, 1093 bp, Artificial Sequence
  35SCaMV promoter engineered with tet operators
gaaaatcttcgtcaacatggtggagcacgacacgcttgtctactccaaaaatatcaaagatacagtctcagaagaccaaagggcaattgagacttttcaacaaagggtaatatccggaaacctcctcggattccattgcccagctatctgtcactttattgtgaagatagtggaaaaggaaggtggctcctacaaatgccatcattgcgataaaggaaaggccatcgttgaagatgcctctgccgacagtggtcccaaagatggacccccacccacgaggagcatcgtggaaaaagaagacgttccaaccacgtcttcaaagcaagtggattgatgtgatatctccactgacgtaagggatgacgcacaatcccactagactctatcagtgatagagtgtatataagactctatcagtgatagagtgaactctatcagtgatagagttgtacttatttttacaacaattaccaacaacaacaaacaacaaacaacattacaattactatttacaattacagtcgacggatcaagtgcaaaggtccgccttgtttctcctctgtctcttgatctgactaatcttggtttatgattcgttgagtaattttggggaaagcttcgtccacagtttttttttcgatgaacagtgccgcagtggcgctgatcttgtatgctatcctgcaatcgtggtgaacttatttcttttatatccttcactcccatgaaaaggctagtaatctttctcgatgtaacatcgtccagcactgctattaccgtgtggtccatccgacagtctggctgaacacatcatacgatattgagcaaagatcgatctatcttccctgttctttaatgaaagacgtcattttcatcagtatgatctaagaatgttgcaacttgcaaggaggcgtttctttctttgaatttaactaactcgttgagtggccctgtttctcggacgtaaggcctttgctgctccacacatgtccattcgaattttaccgtgtttagcaagggcgaaaagtttgcatcttgatgatttagcttgactatgcgattgctttcctggacccgtgcagctgcggacggatcc

SEQ ID NO: 863 - DNA, 8761 bp, Artificial Sequence
  pVER7384
ggcgcgcctcgggatcaggatcaggatctgcggccgcatcctgcaggtcgactctagaggatcctcatcgctatcaactttgtatagaaaagttgccataggattggggccagaatggcccgggggatcctctagagaaaatcttcgtcaacatggtggagcacgacacgcttgtctactccaaaaatatcaaagatacagtctcagaagaccaaagggcaattgagacttttcaacaaagggtaatatccggaaacctcctcggattccattgcccagctatctgtcactttattgtgaagatagtggaaaaggaaggtggctcctacaaatgccatcattgcgataaaggaaaggccatcgttgaagatgcctctgccgacagtggtcccaaagatggacccccacccacgaggagcatcgtggaaaaagaagacgttccaaccacgtcttcaaagcaagtggattgatgtgatatctccactgacgtaagggatgacgcacaatcccactagactctatcagtgatagagtgtatataagactctatcagtgatagagtgaactctatcagtgatagagttgtacttatttttacaacaattaccaacaacaacaaacaacaaacaacattacaattactatttacaattacaccatggcctcctccgaggacgtcatcaaggagttcatgcgcttcaaggtgcgcatggagggctccgtgaacggccacgagttcgagatcgagggcgagggcgagggccgcccctacgagggcacccagaccgccaagctgaaggtgacaaagggcggccccctgcccttcgcctgggacatcctgtccccccagttccagtacggctccaaggtgtacgtgaagcaccccgccgacatccccgactacaagaagctgtccttccccgagggcttcaagtgggagcgcgtgatgaacttcgaggacggcggcgttgtgaccgtgacccaggactcctcccttcaggacggctccttcatctacaaggtgaagttcatcggcgtgaacttcccctccgacggccccgtaatgcagaagaagactatgggctgggaagcctccaccgagcgcctgtacccccgcgacggcgtgctgaagggcgagatccacaaggccctgaagctgaaggacggcggccactacctggtggagttcaagtctatctacatggccaagaagcccgtgcagctgcccggctactactacgtggactccaagctggacatcacctcccacaacgaggactacaccatcgtggagcagtacgagcgtgccgagggccgccaccacctgttcctgtagcgcgctgcaggtacctagatcttgttaactgagctcttttgtgatctgatgataagtggttggttcgtgtctcatgcacttgggaggtgatctatttcacctggtgtagtttgtgtttccgtcagttggaaaaacttatccctatcgatttcgttttcattttctgcttttcttttatgtaccttcgtttgggcttgtaacgggcctttgtatttcaactctcaataataatccaagtgcatgttaaacaatttgtcatctgtttcggctttgatatactactggtgaagatgggccgtactactgcatcacaacgaaaaataataataagatgaaaaacttgaagtggaaaaaaaaaaaaacttgaatgttcactactactcattgaccataatgtttaacatacatagctcaatagtatttttgtgaatatggcaacacaaacagtccaaaacaattgtctcttactataccaaaccaagggcgccgcttgtttgccactctttgtgtgcaatagtgtgattaccacatctccacattcaatatattccctgaattatctgacgattttgatggctcactgttttcccaagtcttgaattgtcttctgtgcgccagtcaaatgcatatgtgttgagtttatcttttaaatatcaagcttttgtttttaacttttgtttgtaaccaaaaactcacagtaggagtttgatcacataattttatgtttgcctttgcaatttctagtgagtctttgattaaaagcttgaaaagaaaatgcagccaagcttaccaagtaagttatgtgtattaaccagaggaagagagaatcttgcaaaatttcaacaaacacaaaaagaagtattactacgattggtggagaaagaaaacgattccaaatcttgaactgttgttgtaaaagcatagcagaaagtgggagacaaccgaaatagaaatgactataacttaatttaatgttatcattataatttcttctagcaaatatttagaaagtaaatatcacatcaacctttaatgtaattaagctttctctttttgattcatgtgagatgaaaagaaaaaaaagaagagaaaagtgtagaaaacacatcatttctaagctgaagggtcaccgaattcaggcctagaaggccatacaagtttgtacaaaaaagcaggctccataggattggggccagaatggcccgggggatcctctagagaaaatcttcgtcaacatggtggagcacgacacgcttgtctactccaaaaatatcaaagatacagtctcagaagaccaaagggcaattgagacttttcaacaaagggtaatatccggaaacctcctcggattccattgcccagctatctgtcactttattgtgaagatagtggaaaaggaaggtggctcctacaaatgccatcattgcgataaaggaaaggccatcgttgaagatgcctctgccgacagtggtcccaaagatggacccccacccacgaggagcatcgtggaaaaagaagacgttccaaccacgtcttcaaagcaagtggattgatgtgatatctccactgacgtaagggatgacgcacaatcccactagactctatcagtgatagagtgtatataagactctatcagtgatagagtgaactctatcagtgatagagttgtacttatttttacaacaattaccaacaacaacaaacaacaaacaacattacaattactatttacaattacaccatggccagactcgacaagagcaaggtgatcaacagcgcactggagctgctgaacgaggtcggaatcgaaggcctcacaacccgtaagctcgcccagaagctcggggttgagcagcctacattgtactggcacgtcaagaacaagcgagctctgctagacgctatggccattgagatgttcgataggcacgccacccactactgtcctttggaaggggaaagctggcaagacttcttgaggaacaaggctaagtccatgagaaatgctttgctcagtcaccgtgatggagccaaggtcgctctaggtacgggcttcacggagcaacagtatgaaactgctgagaactgtcttgccttcctgacacaacaaggtttctcccttgagaacgccctctacgcatttcaagctgttgggatctacactctgggttgcgtcttgctggatcaagagctgcaagtcgctaaggaggagagggaaacacctactactgatagtatgccgccactggttcgacaagcttacgaactcaaagatcaccaaggtgcagagccagccttcctgttcggccttgaactgatcatatgtggattggagaagcagctgaagtgtgaaagtggatcttaatgatagctgcagaaggtacctgttaactgcgcgcgagctcaaacttatctctgttatgaatcagaagaagttcatgtctcgtttcatttaaaactttggtggtttgtgttttggggccttgtaaagcccctgatgaataattgttcaactatgtttccgttcctgtgttatacctttctttctaatgagtaatgacatcaaacttcttctgtattgaaattatgtccttgtgagtctctttatcatcgtttcgtctttacattatatgtgctacttttgtctaatgagcctgaaaagtggctccaatggtacgcactggaagatttgttggcttctggtagatatagcgacagtgttgagcttgtaatatcatgtctcttattgctaaattagttcctttcttaacagaaaccttcaaagtttttgtttttgttttcatttacctaatgtacacatacgctggccatgactaacaacatgtccaggcttagagcatatttttttctagcttaaattgttaacttgtcattcagtaaaatccgagaattgtgaagctctaattgaagctaattcgttttataaagtcagttaaaaagtatactaaattatccaacttttcttcaaaatctcaaaattctatgacaaaacgatagtctttgtttatgtcagtaccacaaagaggtggaaaaaaacaccaaaaaaacaataagcaaactatacactgagaagaaaaataaaagagagcttaatagatgttttatactaacggtagattagatcaaagatccaagctatactctacatagagcagaacccagaatcccttcatatctcttttattctagcaccgataatctactgaaaagaagacacttagagctttgtctctttgtcaaagaagtcccagccgtcatccagaagctccttacgttcattaacagaggtcaccgaattcaggcctagaaggccacccagctttcttgtacaaagtggccgttaacggccagaatggcccgcagatttaggtgacactatagaatatgcatcactagtaagctttgctctagatcaaactcacatccaaacataacatggatatcttccttaccaatcatactaattattttgggttaaatattaatcattatttttaagatattaattaagaaattaaaagattttttaaaaaaatgtataaaattatattattcatgatttttcatacatttgattttgataataaatatattttttttaatttcttaaaaaatgttgcaagacacttattagacatagtcttgttctgtttacaaaagcattcatcatttaatacattaaaaaatatttaatactaacagtagaatcttcttgtgagtggtgtgggagtaggcaacctggcattgaaacgagagaaagagagtcagaaccagaagacaaataaaaagtatgcaacaaacaaatcaaaatcaaagggcaaaggctggggttggctcaattggttgctacattcaattttcaactcagtcaacggttgagattcactctgacttccccaatctaagccgcggatgcaaacggttgaatctaacccacaatccaatctcgttacttaggggcttttccgtcattaactcacccctgccacccggtttccctataaattggaactcaatgctcccctctaaactcgtatcgcttcagagttgagaccaagacacactcgttcatatatctctctgctcttctcttctcttctacctctcaaggtacttttcttctccctctaccaaatcctagattccgtggttcaatttcggatcttgcacttctggtttgctttgccttgctttttcctcaactgggtccatctaggatccatgtgaaactctactctttctttaatatctgcggaatacgcgtttgactttcagatctagtcgaaatcatttcataattgcctttctttcttttagcttatgagaaataaaatcactttttttttatttcaaaataaaccttgggccttgtgctgactgagatggggtttggtgattacagaattttagcgaattttgtaattgtacttgtttgtctgtagttttgttttgttttcttgtttctcatacattccttaggcttcaattttattcgagtataggtcacaataggaattcaaactttgagcaggggaattaatcccttccttcaaatccagtttgtttgtatatatgtttaaaaaatgaaacttttgctttaaattctattataactttttttatggctgaaatttttgcatgtgtctttgctctctgttgtaaatttactgtttaggtactaactctaggcttgttgtgcagtttttgaagtataaccatgccacacaacacaatggcggccaccgcttccagaaccacccgattctcttcttcctcttcacaccccaccttccccaaacgcattactagatccaccctccctctctctcatcaaaccctcaccaaacccaaccacgctctcaaaatcaaatgttccatctccaaaccccccacggcggcgcccttcaccaaggaagcgccgaccacggagcccttcgtgtcacggttcgcctccggcgaacctcgcaagggcgcggacatccttgtggaggcgctggagaggcagggcgtgacgacggtgttcgcgtaccccggcggtgcgtcgatggagatccaccaggcgctcacgcgctccgccgccatccgcaacgtgctcccgcgccacgagcagggcggcgtcttcgccgccgaaggctacgcgcgttcctccggcctccccggcgtctgcattgccacctccggccccggcgccaccaacctcgtgagcggcctcgccgacgctttaatggacagcgtcccagtcgtcgccatcaccggccaggtcgcccgccggatgatcggcaccgacgccttccaagaaaccccgatcgtggaggtgagcagatccatcacgaagcacaactacctcatcctcgacgtcgacgacatcccccgcgtcgtcgccgaggctttcttcgtcgccacctccggccgccccggtccggtcctcatcgacattcccaaagacgttcagcagcaactcgccgtgcctaattgggacgagcccgttaacctccccggttacctcgccaggctgcccaggccccccgccgaggcccaattggaacacattgtcagactcatcatggaggcccaaaagcccgttctctacgtcggcggtggcagtttgaattccagtgctgaattgaggcgctttgttgaactcactggtattcccgttgctagcactttaatgggtcttggaacttttcctattggtgatgaatattcccttcagatgctgggtatgcatggtactgtttatgctaactatgctgttgacaatagtgatttgttgcttgcctttggggtaaggtttgatgaccgtgttactgggaagcttgaggcttttgctagtagggctaagattgttcacattgatattgattctgccgagattgggaagaacaagcaggcgcacgtgtcggtttgcgcggatttgaagttggccttgaagggaattaatatgattttggaggagaaaggagtggagggtaagtttgatcttggaggttggagagaagagattaatgtgcagaaacacaagtttccattgggttacaagacattccaggacgcgatttctccgcagcatgctatcgaggttcttgatgagttgactaatggagatgctattgttagtactggggttgggcagcatcaaatgtgggctgcgcagttttacaagtacaagagaccgaggcagtggttgacctcagggggtcttggagccatgggttttggattgcctgcggctattggtgctgctgttgctaaccctggggctgttgtggttgacattgatggggatggtagtttcatcatgaatgttcaggagttggccactataagagtggagaatctcccagttaagatattgttgttgaacaatcagcatttgggtatggtggttcagttggaggataggttctacaagtccaatagagctcacacctatcttggagatccgtctagcgagagcgagatattcccaaacatgctcaagtttgctgatgcttgtgggataccggcagcgcgagtgacgaagaaggaagagcttagagcggcaattcagagaatgttggacacccctggcccctaccttcttgatgtcattgtgccccatcaggagcatgtgttgccgatgattcccagtaatggatccttcaaggatgtgataactgagggtgatggtagaacgaggtactgattgcctagaccaaatgttccttgatgcttgttttgtacaatatatataagataatgctgtcctagttgcaggatttggcctgtggtgagcatcatagtctgtagtagttttggtagcaagacattttattttccttttatttaacttactacatgcagtagcatctatctatctctgtagtctgatatctcctgttgtctgtattgtgccgttggattttttgctgtagtgagactgaaaatgatgtgctagtaataatatttctgttagaaatctaagtagagaatctgttgaagaagtcaaaagctaatggaatcaggttacatattcaatgtttttctttttttagcggttggtagacgtgtagattcaacttctcttggagctcacctaggcaatcagtaaaatgcatattccttttttaacttgccatttatttacttttagtggaaattgtgaccaatttgttcatgtagaacggatttggaccattgcgtccacaaaacgtctcttttgctcgatcttcacaaagcgataccgaaatccagagatagttttcaaaagtcagaaatggcaaagttataaatagtaaaacagaatagatgctgtaatcgacttcaataacaagtggcatcacgtttctagttctagacccatcagctggcctagaaggcccgggcaactttattatacaaagttgatagattgggcgcgcc

SEQ ID NO: 864 - DNA, 8640 bp, Artificial Sequence
  pVER7385
ggcgcgcctcgggatcaggatcaggatctgcggccgcatcctgcaggtcgactctagaggatcctcatcgctatcaactttgtatagaaaagttgccataggattggggccagaatggcccgggggatcctctagagaaaatcttcgtcaacatggtggagcacgacacgcttgtctactccaaaaatatcaaagatacagtctcagaagaccaaagggcaattgagacttttcaacaaagggtaatatccggaaacctcctcggattccattgcccagctatctgtcactttattgtgaagatagtggaaaaggaaggtggctcctacaaatgccatcattgcgataaaggaaaggccatcgttgaagatgcctctgccgacagtggtcccaaagatggacccccacccacgaggagcatcgtggaaaaagaagacgttccaaccacgtcttcaaagcaagtggattgatgtgatatctccactgacgtaagggatgacgcacaatcccactagactctatcagtgatagagtgtatataagactctatcagtgatagagtgaactctatcagtgatagagttgtacttatttttacaacaattaccaacaacaacaaacaacaaacaacattacaattactatttacaattacaccatggcctcctccgaggacgtcatcaaggagttcatgcgcttcaaggtgcgcatggagggctccgtgaacggccacgagttcgagatcgagggcgagggcgagggccgcccctacgagggcacccagaccgccaagctgaaggtgacaaagggcggccccctgcccttcgcctgggacatcctgtccccccagttccagtacggctccaaggtgtacgtgaagcaccccgccgacatccccgactacaagaagctgtccttccccgagggcttcaagtgggagcgcgtgatgaacttcgaggacggcggcgttgtgaccgtgacccaggactcctcccttcaggacggctccttcatctacaaggtgaagttcatcggcgtgaacttcccctccgacggccccgtaatgcagaagaagactatgggctgggaagcctccaccgagcgcctgtacccccgcgacggcgtgctgaagggcgagatccacaaggccctgaagctgaaggacggcggccactacctggtggagttcaagtctatctacatggccaagaagcccgtgcagctgcccggctactactacgtggactccaagctggacatcacctcccacaacgaggactacaccatcgtggagcagtacgagcgtgccgagggccgccaccacctgttcctgtagcgcgctgcaggtacctagatcttgttaactgagctcttttgtgatctgatgataagtggttggttcgtgtctcatgcacttgggaggtgatctatttcacctggtgtagtttgtgtttccgtcagttggaaaaacttatccctatcgatttcgttttcattttctgcttttcttttatgtaccttcgtttgggcttgtaacgggcctttgtatttcaactctcaataataatccaagtgcatgttaaacaatttgtcatctgtttcggctttgatatactactggtgaagatgggccgtactactgcatcacaacgaaaaataataataagatgaaaaacttgaagtggaaaaaaaaaaaaacttgaatgttcactactactcattgaccataatgtttaacatacatagctcaatagtatttttgtgaatatggcaacacaaacagtccaaaacaattgtctcttactataccaaaccaagggcgccgcttgtttgccactctttgtgtgcaatagtgtgattaccacatctccacattcaatatattccctgaattatctgacgattttgatggctcactgttttcccaagtcttgaattgtcttctgtgcgccagtcaaatgcatatgtgttgagtttatcttttaaatatcaagcttttgtttttaacttttgtttgtaaccaaaaactcacagtaggagtttgatcacataattttatgtttgcctttgcaatttctagtgagtctttgattaaaagcttgaaaagaaaatgcagccaagcttaccaagtaagttatgtgtattaaccagaggaagagagaatcttgcaaaatttcaacaaacacaaaaagaagtattactacgattggtggagaaagaaaacgattccaaatcttgaactgttgttgtaaaagcatagcagaaagtgggagacaaccgaaatagaaatgactataacttaatttaatgttatcattataatttcttctagcaaatatttagaaagtaaatatcacatcaacctttaatgtaattaagctttctctttttgattcatgtgagatgaaaagaaaaaaaagaagagaaaagtgtagaaaacacatcatttctaagctgaagggtcaccgaattcaggcctagaaggccatacaagtttgtacaaaaaagcaggctccataggattggggccagaatggcccgggtctagaggatccagaagaccaaagggcaattgagacttttcaacaaagggtaatatccggaaacctcctcggattccattgcccagctatctgtcactttattgtgaagatagtggaaaaggaaggtggctcctacaaatgccatcattgcgataaaggaaaggccatcgttgaagatgcctctgccgacagtggtcccaaagatggacccccacccacgaggagcatcgtggaaaaagaagacgttccaaccacgtcttcaaagcaagtggattgatgtgatatctccactgacgtaagggatgacgcacaatcccactatccttcgcaagacccttcctctatataaggaagttgatttcatttggagaggacacgctgaaatcacgagtctctctctgcaggacagatccatggccagactcgacaagagcaaggtgatcaacagcgcactggagctgctgaacgaggtcggaatcgaaggcctcacaacccgtaagctcgcccagaagctcggggttgagcagcctacattgtactggcacgtcaagaacaagcgagctctgctagacgctatggccattgagatgttcgataggcacgccacccactactgtcctttggaaggggaaagctggcaagacttcttgaggaacaaggctaagtccatgagaaatgctttgctcagtcaccgtgatggagccaaggtcgctctaggtacgggcttcacggagcaacagtatgaaactgctgagaactgtcttgccttcctgacacaacaaggtttctcccttgagaacgccctctacgcatttcaagctgttgggatctacactctgggttgcgtcttgctggatcaagagctgcaagtcgctaaggaggagagggaaacacctactactgatagtatgccgccactggttcgacaagcttacgaactcaaagatcaccaaggtgcagagccagccttcctgttcggccttgaactgatcatatgtggattggagaagcagctgaagtgtgaaagtggatcttaatgatagctgcagaaggtacctgttaactgcgcgcgagctcaaacttatctctgttatgaatcagaagaagttcatgtctcgtttcatttaaaactttggtggtttgtgttttggggccttgtaaagcccctgatgaataattgttcaactatgtttccgttcctgtgttatacctttctttctaatgagtaatgacatcaaacttcttctgtattgaaattatgtccttgtgagtctctttatcatcgtttcgtctttacattatatgtgctacttttgtctaatgagcctgaaaagtggctccaatggtacgcactggaagatttgttggcttctggtagatatagcgacagtgttgagcttgtaatatcatgtctcttattgctaaattagttcctttcttaacagaaaccttcaaagtttttgtttttgttttcatttacctaatgtacacatacgctggccatgactaacaacatgtccaggcttagagcatatttttttctagcttaaattgttaacttgtcattcagtaaaatccgagaattgtgaagctctaattgaagctaattcgttttataaagtcagttaaaaagtatactaaattatccaacttttcttcaaaatctcaaaattctatgacaaaacgatagtctttgtttatgtcagtaccacaaagaggtggaaaaaaacaccaaaaaaacaataagcaaactatacactgagaagaaaaataaaagagagcttaatagatgttttatactaacggtagattagatcaaagatccaagctatactctacatagagcagaacccagaatcccttcatatctcttttattctagcaccgataatctactgaaaagaagacacttagagctttgtctctttgtcaaagaagtcccagccgtcatccagaagctccttacgttcattaacagaggtcaccgaattcaggcctagaaggccacccagctttcttgtacaaagtggccgttaacggccagaatggcccgcagatttaggtgacactatagaatatgcatcactagtaagctttgctctagatcaaactcacatccaaacataacatggatatcttccttaccaatcatactaattattttgggttaaatattaatcattatttttaagatattaattaagaaattaaaagattttttaaaaaaatgtataaaattatattattcatgatttttcatacatttgattttgataataaatatattttttttaatttcttaaaaaatgttgcaagacacttattagacatagtcttgttctgtttacaaaagcattcatcatttaatacattaaaaaatatttaatactaacagtagaatcttcttgtgagtggtgtgggagtaggcaacctggcattgaaacgagagaaagagagtcagaaccagaagacaaataaaaagtatgcaacaaacaaatcaaaatcaaagggcaaaggctggggttggctcaattggttgctacattcaattttcaactcagtcaacggttgagattcactctgacttccccaatctaagccgcggatgcaaacggttgaatctaacccacaatccaatctcgttacttaggggcttttccgtcattaactcacccctgccacccggtttccctataaattggaactcaatgctcccctctaaactcgtatcgcttcagagttgagaccaagacacactcgttcatatatctctctgctcttctcttctcttctacctctcaaggtacttttcttctccctctaccaaatcctagattccgtggttcaatttcggatcttgcacttctggtttgctttgccttgctttttcctcaactgggtccatctaggatccatgtgaaactctactctttctttaatatctgcggaatacgcgtttgactttcagatctagtcgaaatcatttcataattgcctttctttcttttagcttatgagaaataaaatcactttttttttatttcaaaataaaccttgggccttgtgctgactgagatggggtttggtgattacagaattttagcgaattttgtaattgtacttgtttgtctgtagttttgttttgttttcttgtttctcatacattccttaggcttcaattttattcgagtataggtcacaataggaattcaaactttgagcaggggaattaatcccttccttcaaatccagtttgtttgtatatatgtttaaaaaatgaaacttttgctttaaattctattataactttttttatggctgaaatttttgcatgtgtctttgctctctgttgtaaatttactgtttaggtactaactctaggcttgttgtgcagtttttgaagtataaccatgccacacaacacaatggcggccaccgcttccagaaccacccgattctcttcttcctcttcacaccccaccttccccaaacgcattactagatccaccctccctctctctcatcaaaccctcaccaaacccaaccacgctctcaaaatcaaatgttccatctccaaaccccccacggcggcgcccttcaccaaggaagcgccgaccacggagcccttcgtgtcacggttcgcctccggcgaacctcgcaagggcgcggacatccttgtggaggcgctggagaggcagggcgtgacgacggtgttcgcgtaccccggcggtgcgtcgatggagatccaccaggcgctcacgcgctccgccgccatccgcaacgtgctcccgcgccacgagcagggcggcgtcttcgccgccgaaggctacgcgcgttcctccggcctccccggcgtctgcattgccacctccggccccggcgccaccaacctcgtgagcggcctcgccgacgctttaatggacagcgtcccagtcgtcgccatcaccggccaggtcgcccgccggatgatcggcaccgacgccttccaagaaaccccgatcgtggaggtgagcagatccatcacgaagcacaactacctcatcctcgacgtcgacgacatcccccgcgtcgtcgccgaggctttcttcgtcgccacctccggccgccccggtccggtcctcatcgacattcccaaagacgttcagcagcaactcgccgtgcctaattgggacgagcccgttaacctccccggttacctcgccaggctgcccaggccccccgccgaggcccaattggaacacattgtcagactcatcatggaggcccaaaagcccgttctctacgtcggcggtggcagtttgaattccagtgctgaattgaggcgctttgttgaactcactggtattcccgttgctagcactttaatgggtcttggaacttttcctattggtgatgaatattcccttcagatgctgggtatgcatggtactgtttatgctaactatgctgttgacaatagtgatttgttgcttgcctttggggtaaggtttgatgaccgtgttactgggaagcttgaggcttttgctagtagggctaagattgttcacattgatattgattctgccgagattgggaagaacaagcaggcgcacgtgtcggtttgcgcggatttgaagttggccttgaagggaattaatatgattttggaggagaaaggagtggagggtaagtttgatcttggaggttggagagaagagattaatgtgcagaaacacaagtttccattgggttacaagacattccaggacgcgatttctccgcagcatgctatcgaggttcttgatgagttgactaatggagatgctattgttagtactggggttgggcagcatcaaatgtgggctgcgcagttttacaagtacaagagaccgaggcagtggttgacctcagggggtcttggagccatgggttttggattgcctgcggctattggtgctgctgttgctaaccctggggctgttgtggttgacattgatggggatggtagtttcatcatgaatgttcaggagttggccactataagagtggagaatctcccagttaagatattgttgttgaacaatcagcatttgggtatggtggttcagttggaggataggttctacaagtccaatagagctcacacctatcttggagatccgtctagcgagagcgagatattcccaaacatgctcaagtttgctgatgcttgtgggataccggcagcgcgagtgacgaagaaggaagagcttagagcggcaattcagagaatgttggacacccctggcccctaccttcttgatgtcattgtgccccatcaggagcatgtgttgccgatgattcccagtaatggatccttcaaggatgtgataactgagggtgatggtagaacgaggtactgattgcctagaccaaatgttccttgatgcttgttttgtacaatatatataagataatgctgtcctagttgcaggatttggcctgtggtgagcatcatagtctgtagtagttttggtagcaagacattttattttccttttatttaacttactacatgcagtagcatctatctatctctgtagtctgatatctcctgttgtctgtattgtgccgttggattttttgctgtagtgagactgaaaatgatgtgctagtaataatatttctgttagaaatctaagtagagaatctgttgaagaagtcaaaagctaatggaatcaggttacatattcaatgtttttctttttttagcggttggtagacgtgtagattcaacttctcttggagctcacctaggcaatcagtaaaatgcatattccttttttaacttgccatttatttacttttagtggaaattgtgaccaatttgttcatgtagaacggatttggaccattgcgtccacaaaacgtctcttttgctcgatcttcacaaagcgataccgaaatccagagatagttttcaaaagtcagaaatggcaaagttataaatagtaaaacagaatagatgctgtaatcgacttcaataacaagtggcatcacgtttctagttctagacccatcagctggcctagaaggcccgggcaactttattatacaaagttgatagattgggcgcgcc

SEQ ID NO: 865 - DNA, 8647 bp, Artificial Sequence
  pVER7374
ggcgcgcctcgggatcaggatcaggatctgcggccgcatcctgcaggtcgactctagaggatcctcatcgctatcaactttgtatagaaaagttgccataggattggggccagaatggcccgggggatccttcgtccacagacatcaacatcttatcgtcctttgaagataagataataatgttgaagataagagtgggagccaccactaaaacattgctttgtcaaaagctaaaaaagatgatgcccgacagccacttgtgtgaagcatgagaagccggtccctccactaagaaaattagtgaagcatcttccagtggtccctccactcacagctcaatcagtgagcaacaggacgaaggaaatgacgtaagccatgacgtctaatcccacactctatcagtgatagagtttatataagactctatcagtgatagagtgaactctatcagtgatagagtgagatcaatcgaaatcaaaatcggaatcgaaatcaaaatcggaatcgaaatctctcatctaagagctcaaaaaaaaaaaaaaccatggcctcctccgaggacgtcatcaaggagttcatgcgcttcaaggtgcgcatggagggctccgtgaacggccacgagttcgagatcgagggcgagggcgagggccgcccctacgagggcacccagaccgccaagctgaaggtgacaaagggcggccccctgcccttcgcctgggacatcctgtccccccagttccagtacggctccaaggtgtacgtgaagcaccccgccgacatccccgactacaagaagctgtccttccccgagggcttcaagtgggagcgcgtgatgaacttcgaggacggcggcgttgtgaccgtgacccaggactcctcccttcaggacggctccttcatctacaaggtgaagttcatcggcgtgaacttcccctccgacggccccgtaatgcagaagaagactatgggctgggaagcctccaccgagcgcctgtacccccgcgacggcgtgctgaagggcgagatccacaaggccctgaagctgaaggacggcggccactacctggtggagttcaagtctatctacatggccaagaagcccgtgcagctgcccggctactactacgtggactccaagctggacatcacctcccacaacgaggactacaccatcgtggagcagtacgagcgtgccgagggccgccaccacctgttcctgtagcgcgctgcaggtacctagatcttgttaactgagctcttttgtgatctgatgataagtggttggttcgtgtctcatgcacttgggaggtgatctatttcacctggtgtagtttgtgtttccgtcagttggaaaaacttatccctatcgatttcgttttcattttctgcttttcttttatgtaccttcgtttgggcttgtaacgggcctttgtatttcaactctcaataataatccaagtgcatgttaaacaatttgtcatctgtttcggctttgatatactactggtgaagatgggccgtactactgcatcacaacgaaaaataataataagatgaaaaacttgaagtggaaaaaaaaaaaaacttgaatgttcactactactcattgaccataatgtttaacatacatagctcaatagtatttttgtgaatatggcaacacaaacagtccaaaacaattgtctcttactataccaaaccaagggcgccgcttgtttgccactctttgtgtgcaatagtgtgattaccacatctccacattcaatatattccctgaattatctgacgattttgatggctcactgttttcccaagtcttgaattgtcttctgtgcgccagtcaaatgcatatgtgttgagtttatcttttaaatatcaagcttttgtttttaacttttgtttgtaaccaaaaactcacagtaggagtttgatcacataattttatgtttgcctttgcaatttctagtgagtctttgattaaaagcttgaaaagaaaatgcagccaagcttaccaagtaagttatgtgtattaaccagaggaagagagaatcttgcaaaatttcaacaaacacaaaaagaagtattactacgattggtggagaaagaaaacgattccaaatcttgaactgttgttgtaaaagcatagcagaaagtgggagacaaccgaaatagaaatgactataacttaatttaatgttatcattataatttcttctagcaaatatttagaaagtaaatatcacatcaacctttaatgtaattaagctttctctttttgattcatgtgagatgaaaagaaaaaaaagaagagaaaagtgtagaaaacacatcatttctaagctgaagggtcaccgaattcaggcctagaaggccatacaagtttgtacaaaaaagcaggctccataggattggggccagaatggcccgggggatcctctagagaaaatcttcgtcaacatggtggagcacgacacgcttgtctactccaaaaatatcaaagatacagtctcagaagaccaaagggcaattgagacttttcaacaaagggtaatatccggaaacctcctcggattccattgcccagctatctgtcactttattgtgaagatagtggaaaaggaaggtggctcctacaaatgccatcattgcgataaaggaaaggccatcgttgaagatgcctctgccgacagtggtcccaaagatggacccccacccacgaggagcatcgtggaaaaagaagacgttccaaccacgtcttcaaagcaagtggattgatgtgatatctccactgacgtaagggatgacgcacaatcccactagactctatcagtgatagagtgtatataagactctatcagtgatagagtgaactctatcagtgatagagttgtacttatttttacaacaattaccaacaacaacaaacaacaaacaacattacaattactatttacaattacaccatggccagactcgacaagagcaaggtgatcaacagcgcactggagctgctgaacgaggtcggaatcgaaggcctcacaacccgtaagctcgcccagaagctcggggttgagcagcctacattgtactggcacgtcaagaacaagcgagctctgctagacgctatggccattgagatgttcgataggcacgccacccactactgtcctttggaaggggaaagctggcaagacttcttgaggaacaaggctaagtccatgagaaatgctttgctcagtcaccgtgatggagccaaggtcgctctaggtacgggcttcacggagcaacagtatgaaactgctgagaactgtcttgccttcctgacacaacaaggtttctcccttgagaacgccctctacgcatttcaagctgttgggatctacactctgggttgcgtcttgctggatcaagagctgcaagtcgctaaggaggagagggaaacacctactactgatagtatgccgccactggttcgacaagcttacgaactcaaagatcaccaaggtgcagagccagccttcctgttcggccttgaactgatcatatgtggattggagaagcagctgaagtgtgaaagtggatcttaatgatagctgcagaaggtacctgttaactgcgcgcgagctcaaacttatctctgttatgaatcagaagaagttcatgtctcgtttcatttaaaactttggtggtttgtgttttggggccttgtaaagcccctgatgaataattgttcaactatgtttccgttcctgtgttatacctttctttctaatgagtaatgacatcaaacttcttctgtattgaaattatgtccttgtgagtctctttatcatcgtttcgtctttacattatatgtgctacttttgtctaatgagcctgaaaagtggctccaatggtacgcactggaagatttgttggcttctggtagatatagcgacagtgttgagcttgtaatatcatgtctcttattgctaaattagttcctttcttaacagaaaccttcaaagtttttgtttttgttttcatttacctaatgtacacatacgctggccatgactaacaacatgtccaggcttagagcatatttttttctagcttaaattgttaacttgtcattcagtaaaatccgagaattgtgaagctctaattgaagctaattcgttttataaagtcagttaaaaagtatactaaattatccaacttttcttcaaaatctcaaaattctatgacaaaacgatagtctttgtttatgtcagtaccacaaagaggtggaaaaaaacaccaaaaaaacaataagcaaactatacactgagaagaaaaataaaagagagcttaatagatgttttatactaacggtagattagatcaaagatccaagctatactctacatagagcagaacccagaatcccttcatatctcttttattctagcaccgataatctactgaaaagaagacacttagagctttgtctctttgtcaaagaagtcccagccgtcatccagaagctccttacgttcattaacagaggtcaccgaattcaggcctagaaggccacccagctttcttgtacaaagtggccgttaacggccagaatggcccgcagatttaggtgacactatagaatatgcatcactagtaagctttgctctagatcaaactcacatccaaacataacatggatatcttccttaccaatcatactaattattttgggttaaatattaatcattatttttaagatattaattaagaaattaaaagattttttaaaaaaatgtataaaattatattattcatgatttttcatacatttgattttgataataaatatattttttttaatttcttaaaaaatgttgcaagacacttattagacatagtcttgttctgtttacaaaagcattcatcatttaatacattaaaaaatatttaatactaacagtagaatcttcttgtgagtggtgtgggagtaggcaacctggcattgaaacgagagaaagagagtcagaaccagaagacaaataaaaagtatgcaacaaacaaatcaaaatcaaagggcaaaggctggggttggctcaattggttgctacattcaattttcaactcagtcaacggttgagattcactctgacttccccaatctaagccgcggatgcaaacggttgaatctaacccacaatccaatctcgttacttaggggcttttccgtcattaactcacccctgccacccggtttccctataaattggaactcaatgctcccctctaaactcgtatcgcttcagagttgagaccaagacacactcgttcatatatctctctgctcttctcttctcttctacctctcaaggtacttttcttctccctctaccaaatcctagattccgtggttcaatttcggatcttgcacttctggtttgctttgccttgctttttcctcaactgggtccatctaggatccatgtgaaactctactctttctttaatatctgcggaatacgcgtttgactttcagatctagtcgaaatcatttcataattgcctttctttcttttagcttatgagaaataaaatcactttttttttatttcaaaataaaccttgggccttgtgctgactgagatggggtttggtgattacagaattttagcgaattttgtaattgtacttgtttgtctgtagttttgttttgttttcttgtttctcatacattccttaggcttcaattttattcgagtataggtcacaataggaattcaaactttgagcaggggaattaatcccttccttcaaatccagtttgtttgtatatatgtttaaaaaatgaaacttttgctttaaattctattataactttttttatggctgaaatttttgcatgtgtctttgctctctgttgtaaatttactgtttaggtactaactctaggcttgttgtgcagtttttgaagtataaccatgccacacaacacaatggcggccaccgcttccagaaccacccgattctcttcttcctcttcacaccccaccttccccaaacgcattactagatccaccctccctctctctcatcaaaccctcaccaaacccaaccacgctctcaaaatcaaatgttccatctccaaaccccccacggcggcgcccttcaccaaggaagcgccgaccacggagcccttcgtgtcacggttcgcctccggcgaacctcgcaagggcgcggacatccttgtggaggcgctggagaggcagggcgtgacgacggtgttcgcgtaccccggcggtgcgtcgatggagatccaccaggcgctcacgcgctccgccgccatccgcaacgtgctcccgcgccacgagcagggcggcgtcttcgccgccgaaggctacgcgcgttcctccggcctccccggcgtctgcattgccacctccggccccggcgccaccaacctcgtgagcggcctcgccgacgctttaatggacagcgtcccagtcgtcgccatcaccggccaggtcgcccgccggatgatcggcaccgacgccttccaagaaaccccgatcgtggaggtgagcagatccatcacgaagcacaactacctcatcctcgacgtcgacgacatcccccgcgtcgtcgccgaggctttcttcgtcgccacctccggccgccccggtccggtcctcatcgacattcccaaagacgttcagcagcaactcgccgtgcctaattgggacgagcccgttaacctccccggttacctcgccaggctgcccaggccccccgccgaggcccaattggaacacattgtcagactcatcatggaggcccaaaagcccgttctctacgtcggcggtggcagtttgaattccagtgctgaattgaggcgctttgttgaactcactggtattcccgttgctagcactttaatgggtcttggaacttttcctattggtgatgaatattcccttcagatgctgggtatgcatggtactgtttatgctaactatgctgttgacaatagtgatttgttgcttgcctttggggtaaggtttgatgaccgtgttactgggaagcttgaggcttttgctagtagggctaagattgttcacattgatattgattctgccgagattgggaagaacaagcaggcgcacgtgtcggtttgcgcggatttgaagttggccttgaagggaattaatatgattttggaggagaaaggagtggagggtaagtttgatcttggaggttggagagaagagattaatgtgcagaaacacaagtttccattgggttacaagacattccaggacgcgatttctccgcagcatgctatcgaggttcttgatgagttgactaatggagatgctattgttagtactggggttgggcagcatcaaatgtgggctgcgcagttttacaagtacaagagaccgaggcagtggttgacctcagggggtcttggagccatgggttttggattgcctgcggctattggtgctgctgttgctaaccctggggctgttgtggttgacattgatggggatggtagtttcatcatgaatgttcaggagttggccactataagagtggagaatctcccagttaagatattgttgttgaacaatcagcatttgggtatggtggttcagttggaggataggttctacaagtccaatagagctcacacctatcttggagatccgtctagcgagagcgagatattcccaaacatgctcaagtttgctgatgcttgtgggataccggcagcgcgagtgacgaagaaggaagagcttagagcggcaattcagagaatgttggacacccctggcccctaccttcttgatgtcattgtgccccatcaggagcatgtgttgccgatgattcccagtaatggatccttcaaggatgtgataactgagggtgatggtagaacgaggtactgattgcctagaccaaatgttccttgatgcttgttttgtacaatatatataagataatgctgtcctagttgcaggatttggcctgtggtgagcatcatagtctgtagtagttttggtagcaagacattttattttccttttatttaacttactacatgcagtagcatctatctatctctgtagtctgatatctcctgttgtctgtattgtgccgttggattttttgctgtagtgagactgaaaatgatgtgctagtaataatatttctgttagaaatctaagtagagaatctgttgaagaagtcaaaagctaatggaatcaggttacatattcaatgtttttctttttttagcggttggtagacgtgtagattcaacttctcttggagctcacctaggcaatcagtaaaatgcatattccttttttaacttgccatttatttacttttagtggaaattgtgaccaatttgttcatgtagaacggatttggaccattgcgtccacaaaacgtctcttttgctcgatcttcacaaagcgataccgaaatccagagatagttttcaaaagtcagaaatggcaaagttataaatagtaaaacagaatagatgctgtaatcgacttcaataacaagtggcatcacgtttctagttctagacccatcagctggcctagaaggcccgggcaactttattatacaaagttgatagattgggcgcgcc

SEQ ID NO: 866 - DNA, 8908 bp, Artificial Sequence
  pVER7578
ggcgcgcctcgggatcaggatcaggatctgcggccgcatcctgcaggtcgactctagaggatcctcatcgctatcaactttgtatagaaaagttgccataggattggggccagaatggcccgggggatcctctagagaaaatcttcgtcaacatggtggagcacgacacgcttgtctactccaaaaatatcaaagatacagtctcagaagaccaaagggcaattgagacttttcaacaaagggtaatatccggaaacctcctcggattccattgcccagctatctgtcactttattgtgaagatagtggaaaaggaaggtggctcctacaaatgccatcattgcgataaaggaaaggccatcgttgaagatgcctctgccgacagtggtcccaaagatggacccccacccacgaggagcatcgtggaaaaagaagacgttccaaccacgtcttcaaagcaagtggattgatgtgatatctccactgacgtaagggatgacgcacaatcccactagactctatcagtgatagagtgtatataagactctatcagtgatagagtgaactctatcagtgatagagttgtacttatttttacaacaattaccaacaacaacaaacaacaaacaacattacaattactatttacaattacaccatggcctcctccgaggacgtcatcaaggagttcatgcgcttcaaggtgcgcatggagggctccgtgaacggccacgagttcgagatcgagggcgagggcgagggccgcccctacgagggcacccagaccgccaagctgaaggtgacaaagggcggccccctgcccttcgcctgggacatcctgtccccccagttccagtacggctccaaggtgtacgtgaagcaccccgccgacatccccgactacaagaagctgtccttccccgagggcttcaagtgggagcgcgtgatgaacttcgaggacggcggcgttgtgaccgtgacccaggactcctcccttcaggacggctccttcatctacaaggtgaagttcatcggcgtgaacttcccctccgacggccccgtaatgcagaagaagactatgggctgggaagcctccaccgagcgcctgtacccccgcgacggcgtgctgaagggcgagatccacaaggccctgaagctgaaggacggcggccactacctggtggagttcaagtctatctacatggccaagaagcccgtgcagctgcccggctactactacgtggactccaagctggacatcacctcccacaacgaggactacaccatcgtggagcagtacgagcgtgccgagggccgccaccacctgttcctgtagcgcgctgcaggtacctagatcttgttaactgagctcttttgtgatctgatgataagtggttggttcgtgtctcatgcacttgggaggtgatctatttcacctggtgtagtttgtgtttccgtcagttggaaaaacttatccctatcgatttcgttttcattttctgcttttcttttatgtaccttcgtttgggcttgtaacgggcctttgtatttcaactctcaataataatccaagtgcatgttaaacaatttgtcatctgtttcggctttgatatactactggtgaagatgggccgtactactgcatcacaacgaaaaataataataagatgaaaaacttgaagtggaaaaaaaaaaaaacttgaatgttcactactactcattgaccataatgtttaacatacatagctcaatagtatttttgtgaatatggcaacacaaacagtccaaaacaattgtctcttactataccaaaccaagggcgccgcttgtttgccactctttgtgtgcaatagtgtgattaccacatctccacattcaatatattccctgaattatctgacgattttgatggctcactgttttcccaagtcttgaattgtcttctgtgcgccagtcaaatgcatatgtgttgagtttatcttttaaatatcaagcttttgtttttaacttttgtttgtaaccaaaaactcacagtaggagtttgatcacataattttatgtttgcctttgcaatttctagtgagtctttgattaaaagcttgaaaagaaaatgcagccaagcttaccaagtaagttatgtgtattaaccagaggaagagagaatcttgcaaaatttcaacaaacacaaaaagaagtattactacgattggtggagaaagaaaacgattccaaatcttgaactgttgttgtaaaagcatagcagaaagtgggagacaaccgaaatagaaatgactataacttaatttaatgttatcattataatttcttctagcaaatatttagaaagtaaatatcacatcaacctttaatgtaattaagctttctctttttgattcatgtgagatgaaaagaaaaaaaagaagagaaaagtgtagaaaacacatcatttctaagctgaagggtcaccgaattcaggcctagaaggccatacaagtttgtacaaaaaagcaggctccataggattggggccagaatggcccgggtctagaggatccgcggccgcgcccaattcgtcaacttcgtccacagacatcaacatcttatcgtcctttgaagataagataataatgttgaagataagagtgggagcccccactaaaacattgctttgtcaaaagctaaaaaagatgatgcccgacagccacttgtgtgaagcatgagaagccggtccctccactaagaaaattagtgaagcatcttccagtggtccctccactcacagctcaatcagtgagcaacaggacgaaggaaatgacgtaagccatgacgtctaatcccaacttcgtccacagacatcaacatcttatcgtcctttgaagataagataataatgttgaagataagagtgggagccaccactaaaacattgctttgtcaaaagctaaaaaagatgatgcccgacagccacttgtgtgaagcatgagaagccggtccctccactaagaaaattagtgaagcatcttccagtggtccctccactcacagctcaatcagtgagcaacaggacgaaggaaatgacgtaagccatgacgtctaatcccacaagaatttccttatataaggaacacaaatcagaaggaagagatcaatcgaaatcaaaatcggaatcgaaatcaaaatcggaatcgaaatctctcatctaagagctcaaaaaaaaaaaaaaccatggccagactcgacaagagcaaggtgatcaacagcgcactggagctgctgaacgaggtcggaatcgaaggtctcacaacccgtaagctcgcccagaagctcggggttgagcagcctacattgtactggcacgtcaagaacaagcgagctctgctagacgctatggccattgagatgctcgataggcacgctacccactactgccctttggaaggggaaagctggcaagacttcttgaggaacaacgctaagtccatgagatgtgctttgctcagtcaccgtgatggagccaaggtctgtctaggtacgggcttcacggagcaacagtatgaaactgctgagaacagccttgccttcctgtgccaacaaggtttctcccttgagaacgccctctacgcaatgcaagctgttgggatctacactctgggttgcgtcttgctggatcaagagctgcaagtcgctaaggaggagagggaaacacctactactgatagtatgccgccactggttcgacaagctctggaactcaaggatcaccaaggtgcagagccagccttcctgttcggccttgaactgatcatatgcggattggagaagcagctgaagtgtgaaagtgggtcttaatgatagctgcagaaggtacctgttaactgcgcgcgagctcaaacttatctctgttatgaatcagaagaagttcatgtctcgtttcatttaaaactttggtggtttgtgttttggggccttgtaaagcccctgatgaataattgttcaactatgtttccgttcctgtgttatacctttctttctaatgagtaatgacatcaaacttcttctgtattgaaattatgtccttgtgagtctctttatcatcgtttcgtctttacattatatgtgctacttttgtctaatgagcctgaaaagtggctccaatggtacgcactggaagatttgttggcttctggtagatatagcgacagtgttgagcttgtaatatcatgtctcttattgctaaattagttcctttcttaacagaaaccttcaaagtttttgtttttgttttcatttacctaatgtacacatacgctggccatgactaacaacatgtccaggcttagagcatatttttttctagcttaaattgttaacttgtcattcagtaaaatccgagaattgtgaagctctaattgaagctaattcgttttataaagtcagttaaaaagtatactaaattatccaacttttcttcaaaatctcaaaattctatgacaaaacgatagtctttgtttatgtcagtaccacaaagaggtggaaaaaaacaccaaaaaaacaataagcaaactatacactgagaagaaaaataaaagagagcttaatagatgttttatactaacggtagattagatcaaagatccaagctatactctacatagagcagaacccagaatcccttcatatctcttttattctagcaccgataatctactgaaaagaagacacttagagctttgtctctttgtcaaagaagtcccagccgtcatccagaagctccttacgttcattaacagaggtcaccgaattcaggcctagaaggccacccagctttcttgtacaaagtggccgttaacggccagaatggcccgcagatttaggtgacactatagaatatgcatcactagtaagctttgctctagatcaaactcacatccaaacataacatggatatcttccttaccaatcatactaattattttgggttaaatattaatcattatttttaagatattaattaagaaattaaaagattttttaaaaaaatgtataaaattatattattcatgatttttcatacatttgattttgataataaatatattttttttaatttcttaaaaaatgttgcaagacacttattagacatagtcttgttctgtttacaaaagcattcatcatttaatacattaaaaaatatttaatactaacagtagaatcttcttgtgagtggtgtgggagtaggcaacctggcattgaaacgagagaaagagagtcagaaccagaagacaaataaaaagtatgcaacaaacaaatcaaaatcaaagggcaaaggctggggttggctcaattggttgctacattcaattttcaactcagtcaacggttgagattcactctgacttccccaatctaagccgcggatgcaaacggttgaatctaacccacaatccaatctcgttacttaggggcttttccgtcattaactcacccctgccacccggtttccctataaattggaactcaatgctcccctctaaactcgtatcgcttcagagttgagaccaagacacactcgttcatatatctctctgctcttctcttctcttctacctctcaaggtacttttcttctccctctaccaaatcctagattccgtggttcaatttcggatcttgcacttctggtttgctttgccttgctttttcctcaactgggtccatctaggatccatgtgaaactctactctttctttaatatctgcggaatacgcgtttgactttcagatctagtcgaaatcatttcataattgcctttctttcttttagcttatgagaaataaaatcactttttttttatttcaaaataaaccttgggccttgtgctgactgagatggggtttggtgattacagaattttagcgaattttgtaattgtacttgtttgtctgtagttttgttttgttttcttgtttctcatacattccttaggcttcaattttattcgagtataggtcacaataggaattcaaactttgagcaggggaattaatcccttccttcaaatccagtttgtttgtatatatgtttaaaaaatgaaacttttgctttaaattctattataactttttttatggctgaaatttttgcatgtgtctttgctctctgttgtaaatttactgtttaggtactaactctaggcttgttgtgcagtttttgaagtataaccatgccacacaacacaatggcggccaccgcttccagaaccacccgattctcttcttcctcttcacaccccaccttccccaaacgcattactagatccaccctccctctctctcatcaaaccctcaccaaacccaaccacgctctcaaaatcaaatgttccatctccaaaccccccacggcggcgcccttcaccaaggaagcgccgaccacggagcccttcgtgtcacggttcgcctccggcgaacctcgcaagggcgcggacatccttgtggaggcgctggagaggcagggcgtgacgacggtgttcgcgtaccccggcggtgcgtcgatggagatccaccaggcgctcacgcgctccgccgccatccgcaacgtgctcccgcgccacgagcagggcggcgtcttcgccgccgaaggctacgcgcgttcctccggcctccccggcgtctgcattgccacctccggccccggcgccaccaacctcgtgagcggcctcgccgacgctttaatggacagcgtcccagtcgtcgccatcaccggccaggtcgcccgccggatgatcggcaccgacgccttccaagaaaccccgatcgtggaggtgagcagatccatcacgaagcacaactacctcatcctcgacgtcgacgacatcccccgcgtcgtcgccgaggctttcttcgtcgccacctccggccgccccggtccggtcctcatcgacattcccaaagacgttcagcagcaactcgccgtgcctaattgggacgagcccgttaacctccccggttacctcgccaggctgcccaggccccccgccgaggcccaattggaacacattgtcagactcatcatggaggcccaaaagcccgttctctacgtcggcggtggcagtttgaattccagtgctgaattgaggcgctttgttgaactcactggtattcccgttgctagcactttaatgggtcttggaacttttcctattggtgatgaatattcccttcagatgctgggtatgcatggtactgtttatgctaactatgctgttgacaatagtgatttgttgcttgcctttggggtaaggtttgatgaccgtgttactgggaagcttgaggcttttgctagtagggctaagattgttcacattgatattgattctgccgagattgggaagaacaagcaggcgcacgtgtcggtttgcgcggatttgaagttggccttgaagggaattaatatgattttggaggagaaaggagtggagggtaagtttgatcttggaggttggagagaagagattaatgtgcagaaacacaagtttccattgggttacaagacattccaggacgcgatttctccgcagcatgctatcgaggttcttgatgagttgactaatggagatgctattgttagtactggggttgggcagcatcaaatgtgggctgcgcagttttacaagtacaagagaccgaggcagtggttgacctcagggggtcttggagccatgggttttggattgcctgcggctattggtgctgctgttgctaaccctggggctgttgtggttgacattgatggggatggtagtttcatcatgaatgttcaggagttggccactataagagtggagaatctcccagttaagatattgttgttgaacaatcagcatttgggtatggtggttcagttggaggataggttctacaagtccaatagagctcacacctatcttggagatccgtctagcgagagcgagatattcccaaacatgctcaagtttgctgatgcttgtgggataccggcagcgcgagtgacgaagaaggaagagcttagagcggcaattcagagaatgttggacacccctggcccctaccttcttgatgtcattgtgccccatcaggagcatgtgttgccgatgattcccagtaatggatccttcaaggatgtgataactgagggtgatggtagaacgaggtactgattgcctagaccaaatgttccttgatgcttgttttgtacaatatatataagataatgctgtcctagttgcaggatttggcctgtggtgagcatcatagtctgtagtagttttggtagcaagacattttattttccttttatttaacttactacatgcagtagcatctatctatctctgtagtctgatatctcctgttgtctgtattgtgccgttggattttttgctgtagtgagactgaaaatgatgtgctagtaataatatttctgttagaaatctaagtagagaatctgttgaagaagtcaaaagctaatggaatcaggttacatattcaatgtttttctttttttagcggttggtagacgtgtagattcaacttctcttggagctcacctaggcaatcagtaaaatgcatattccttttttaacttgccatttatttacttttagtggaaattgtgaccaatttgttcatgtagaacggatttggaccattgcgtccacaaaacgtctcttttgctcgatcttcacaaagcgataccgaaatccagagatagttttcaaaagtcagaaatggcaaagttataaatagtaaaacagaatagatgctgtaatcgacttcaataacaagtggcatcacgtttctagttctagacccatcagctggcctagaaggcccgggcaactttttatacaaagttgatagattgggcgcgcc
